United States Patent Application Publication US 2022/0211063 A1 - sequence listing, part 12

SEQ ID NO: 10 - DNA, 2509514 bp, Penicillium roqueforti (residues 1,254,758-2,509,514 of 2,509,514)
  misc_feature (1216)..(6722): n is a, c, g, or t
  misc_feature (98825)..(99196): n is a, c, g, or t
  misc_feature (140333)..(140428): n is a, c, g, or t
  misc_feature (294676)..(294851): n is a, c, g, or t
  misc_feature (357686)..(357871): n is a, c, g, or t
  misc_feature (461240)..(461316): n is a, c, g, or t
  misc_feature (472832)..(473013): n is a, c, g, or t
  misc_feature (615983)..(616264): n is a, c, g, or t
  misc_feature (740673)..(740781): n is a, c, g, or t
  misc_feature (916608)..(916744): n is a, c, g, or t
  misc_feature (1075775)..(1075920): n is a, c, g, or t
  misc_feature (1090226)..(1208726): n is a, c, g, or t
  misc_feature (1220316)..(1220357): n is a, c, g, or t
  misc_feature (1222717)..(1222890): n is a, c, g, or t
  misc_feature (1322402)..(1322472): n is a, c, g, or t
  misc_feature (1378583)..(1378955): n is a, c, g, or t
  misc_feature (1383626)..(1383985): n is a, c, g, or t
  misc_feature (1417670)..(1417930): n is a, c, g, or t
  misc_feature (1457652)..(1457846): n is a, c, g, or t
  misc_feature (1553838)..(1553908): n is a, c, g, or t
  misc_feature (1556740)..(1556844): n is a, c, g, or t
  misc_feature (1568441)..(1568536): n is a, c, g, or t
  misc_feature (1711694)..(1717436): n is a, c, g, or t
  misc_feature (1762554)..(1762695): n is a, c, g, or t
  misc_feature (1946431)..(1946528): n is a, c, g, or t
  misc_feature (1957031)..(1957153): n is a, c, g, or t
  misc_feature (2133678)..(2133781): n is a, c, g, or t
  misc_feature (2257081)..(2257239): n is a, c, g, or t
  misc_feature (2268380)..(2268411): n is a, c, g, or t
  misc_feature (2288724)..(2288892): n is a, c, g, or t
  misc_feature (2342113)..(2342131): n is a, c, g, or t
  misc_feature (2431724)..(2432069): n is a, c, g, or t
  misc_feature (2439433)..(2439883): n is a, c, g, or t
  misc_feature (2445715)..(2445859): n is a, c, g, or t
  misc_feature (2483152)..(2483360): n is a, c, g, or t
  misc_feature (2509508)..(2509509): n is a, c, g, or t
  misc_feature (2509511)..(2509512): n is a, c, g, or t
ccttccacaccgggatgcaagctttgactttgcgatttcaatcgcggtggtgcaccatctttccactccggctcggcgagtccaggccgtcgccgagatcatgcgaactgtgaaacatggttcagagatgcaggagggcgggaaagtcctgatctacgcctgggccctcgagcaaaagaacagccgtagaggttgggacaagggcgacgagcaagatcgaatggttccctgggttcgtaaaggtgatcaaccccagactttccatcgctactaccacctgtacgcggaaggcgagctggagcgcgacatcggcaatgctggcggtcgtgtgctagaatctgggtacgagaaagataactggtgggcgatcgcaacccccaaaacggctcatgacgtatgaaaatgtgatatgcgttccgagagccagcctcggagtcatggcacatcaattcgcacttgctggccccgccaaaatttctgcaaacaaaggaaaagaacgcaacaaacaccgaggggtagaaatcatctatacgattcactatccccacaaatcacgatatacctccaaccggcgctatgcaattcgtaacagaaaaatcacaaaagaaaagaaaaaaaaggcaggggaaactcaaggaaagacgtatagggcgtcatcgtcgtcgtcatttcatcctaaggcatggtccgggggggcatgccaaggtgatggcccatgaaatttggtgggggaatccccatctctggtggtcgtccaattccatagaactctctcgggggcggtggagccggtgcgtatgcagggacgcctgcagtgagctcttccagggagggaagttgaggtggaagtcctggcagatggcctgggattgcgcgtgaggaagatccctttctcggccgggatagagaggtgctggcacggcgggttctagtggttgggggatcgatggcagcactggagagagagaatggcaccacgcctgcgcgtcgagccatctcctgctctcccagctgccagtgcatggcctctgctgcacgccatgggatagccatttcctccgctaccttggaccacatttcggctttgaacctgccagacgagtgtgagattagtgaatttggtttcttgtcatccctatcccaaacctacctctcgtataaacgggctagtttgttcttcttatcttcatcccattcactgcggcgttccaagtagttctgataatggagacggcaactgatggcactgcggccggggagtcgtttgctgatatcctcccacttcatgccactgccacgcagttcgatgatcagggcgtcctcatctggcgaccatttggactgcttcttggctggagattcggacgtatgcgagggctgcaggcgcttggcagcacccgatggaccggacttggtcaagggtggcatcaccatggcagccgggcctggcatagtcatcatgggacccagaccgagtggtggccctatcgttctgggcgggtacccagtgttcaggccgggggcggcttcttcctcatcttggggcttgagtagcagtgagatatccactttgacaggaggcaatataggccgattttgtaacgcaatcatatgcgcggatgagcaccggtgaatagaacagagaacaaagcagcagggggatccccgactagaggggggaaggggataagaagagaaaagagggaaggtgctcgtggacccaagtctttcccaaaatatgacagaacgatccaacgttctccaaagtgttcttttttttttctcgaattgaattggatgaaatctccaggatatcagagaatagaagtgaggggaaggaagtatggaaattgaagaattcaaggattgtagaattggtacagaaaagggagaagaaggaaaaggacgatatgaagcattcaactcgaaggtgaaacgaatgcagaagtgacagctgatctaaacctatcttgaagcgaagggaggagaagaagagtcttagaccgttggggggtggactattaagggtaacggctgttacaaagtaaaaaatacttcaatatccactggttttaattaaagatgcggtcagttcccctggtctactctgggtgatcttcgtcatgctggtctggatttttagatcatccatcctggtccaagtcctcaggcttgcgatatcactggaatggatataaatagggcgactctcgagagctatcgactgcaaagtatatagacgggcaatgtttgatatgacctgcagagtttcatactaacccagagaaggaatgaggggcaacgttctatgggaccaaacggtatgtaccagagtccttaccataatgtaccaggttaaatgatggctaaagccgactaattaattcaaagtaatcccaatggggccactcctttgggtttgtgtttttatttcaaacttaaaaaagtcaaaattaatccagaaacattaaaaaaacattcaattagataataaatatataataaataatcccaattcaatttaaatccataaatcaagcccggggacccgcatcaccctttggttaaatgagaacggtcttctccggtccagagtccagcccgttgcaactaaaagttccagatctttaacggctttttgggaatatcttgaattccttgggggattgaccaggatatgtcacccttggaaccagtcggggaattttctgtgattattcacttccaaggttcttccccccttgctcttgtttgtggggcgttcccgactctcgggtgtccatgtgtttattccttctggtataagtaccttattaaagagagagagatatagaggtggtgggcttcgaagccgaatggaacattctataaggaaatatctatattttttttttttttctttaatgaatccaggacctgatgtctcgaatctggttctatacatctcatagatttaagattggtagggtaatttgctttccctcaggctaaggtcttagaactggctcttgaacgacggggcacgcgttcacgcatttccaagattaagggactggtgggtcgaattcaatttccacaatttccacaatttccacctttttgacagccaatttcccgtacaatgcaattctagtgcacgtgatgcctctggacccagaaaccgggcatcggcttggggaagtcttattccacggagtagacaatatagtactctaactatatcatacactctatctatgagtatatctttacttccattattctatccattaccacggacttccctatatgatactcccctttcttcactccgacgatcagtcttcctgaaacctccgttcagtcaatgcaccgaggatcagcaagctatccctcttcctgttcgtactttgtactcccgggcctcgaatcctgtctgtcaactttccaacccatcaggcaacaaaaaggcaaaggcaaaaaaaaaaaaaaaggaaaaaaggaaaaacagaaagtcgaacgtgtaagtggatcatgtacaacgttcgcaaggcgatcgttgcctcccttggcttcgttcggagccagcacagacatgacccgttcggtagctacggcttcatcgaccttatgatccgcttggagcaacgggggggctatccgtagaccaatgtctagattatatccgagggggaatgaccggtataatggggagaggtataaaagtaaaaggaattcaggccatgcttcgagggcctgggggtgggagggagagacaaaagatatgttaacagtcagacgcgggagggaagaagccacaagtgtgatgatacaggatgtcgccctactctaacggcgcacacaccgtatgtacagttgagggggcaggttcagccaaccatgaagaatgaacggggtggagtttcaaggaggggcaaatgtcggatcatcatgactatgacttaagtggtagcgaagagctggtggcgctgcgcggagtgtttctcttttctatttattgtcgcgatcaccctaaatatccgacacgcacccgttggacccggtttttttggtcgtttttgattcgaagctcattattttgccattggtatcatttcagatggatgcgagtgggtttctcttatatctcactatgtatgtacctaccactagccacatatgcactgtgaacggagaattaactgttccacttagatccgtaggatcatctgcttcagctccagtggcgcccaaccgtttgaattggggcagtgcgctcaacggtggatcttcggtagatggggaggaaccctgctgtcaacactccctacggagtacactattttgctatggatcatcgggggaggccatatttgttccgaaagtggatgtatctcaaatatgtacgtatactaacacaaagtacagagaggcacagagaagatcccgacaagagaaggagcacggtatagctttcggccggacctcttgatattccatggccaatcatcagcctggagatttctatttcatttggctccacatctgaaacagctgctgtgtggtcaagtcccttctagacactagacactttaggtggaacgcggttcatttgcacggagtatttctcctacacttgctccatatgttgtagtagacttaagattatcggtctcgaacattcttctgcaaaaaccgggggaacacggccagcaaggaaattggctgattccagcccgtttatggtcccattgggccctgggatctgactgggaagttcaccgagatatcctgggaagctgatttcagagatgcagtacatttttttcatctctctttgaatatgttctatgtgtgtgaacagcccgctatttatagatggtttctttgttgtggatgtaagtcggcttgggatctggtaaatggaacagctcaaagtctgtgaaggaacaaaataatcaagtgtaagtgggatgggggttgaatgaaagttgaatgaatgtctcgagaattcagtagagttcttgcctttctttgatcaccatatccctgattcattggttccatcatgcattcaaagaattcccaatcgatgccacattttccttggagatgagaacaatgaaaatcagttgcaatgcgagataaattagactgcgaccccctcaagtgagcaacagcttcacatattgattcatttcatattctatcatggccaaaactaaacaagtcccaaagaaagtcctagaggaagaggaagaggaggaagtcgaagcctcaacagcgcaaaggggaagatcagacgaagagaaaatgagagtgagtgtagccaacctctacatcaacaagtctaacaagagagatagaccgtcatccccaaacattggcatccagccttgcccaataagaccaccgtgggcttgcccaatgcccgggttgactgctatcgaaatgtcgtcttccaaatgcttctgcatatgccgattcttcacaattggctcatctggtatatgaaccaccatgcccctaggggttacgtttgcaagatgggtgaagatttccgcagatgccaagtttgcgaacttgccgaggtcttccaaagttattgggcaaatgaaactagaaattggatctatacctttagatatctagcaaggacgatcttacttaagtggaaaccaaacggcgagaattcggaacaagacccagcagagtactttgtgaaagtttacaatgccatcaaagagggcatcaggcctatgatgtatgttattctctccatattccccctacacgcagaagactgacttgagactccaggaaaggagacttcgaagatatgttcgaggtcggaatcatccagaggagagaatgtgctggggaaaacccctgtgccccaagatacaccccgagccagcaaccggtcatgctgctcccattttcagagcacaacacactccccgccaggcctactttgggcgatgtagtcaaacaatactttgaaaatgtagacgatctcggtacatgtccggactgtggaggcaagaagacatccaacgaccgaattggacgttttcctgagcttctcgtgatccagctcaaccgcgccaatgattttggccaaaagatccaaacccacgtatatctgaccgagcagttaaatatcgagacacggttcatggatgaacgctggggcaacgaacgaaaagtcgtccggtataaactgacctcgatggtcttgcattttggccagcatgtacaatcaggtcattacatgatcgctgtcaaaggtaaaggaggtcaatggtctatggcgaatgacactcaagtcaatgactgggaccccgaaggacccgagagcagcctggactatcccgctacctgttatctctttacataccgccggttacccacggaagacgaggcagagaaaatcccagatgacgaggccattcaggccgactccggtttatgctcggacgatgatgtgtttgagaatgttgatcctggcctaggattacctccggtccctgagaatactgtcgttaagatccctgagaacactgtctttgagaattctgtctttgagaagtctgtctttgggaattctatctttgggaactctgtctttgggagctctgtccctgagaactctgtccctgagtcaggcgccagtgtctggggagttgatcccaggacattggagaagttactggaggtgatcattcccaaggccgtcgatacctatatagcccgctcagcggatgcgaggcacaaggagtgggatcaatggtcgaaggaatgggcgaaggaatgggagaagagaagaacagccgaaggagcgaacacaacagccaaaggagcgaacacaacagccgaaggagcgaacaaatctgctatttgccctggttgcgacaaggatatggtcaattggcagaagcaacgaggaagacttcaggtaactttgactgaaaatcaggggaatggggaaaagatcctagacctcgaagttcaaggtctacactacaatcgactcaagaggaaggtgggcaaggaagccgataaggcagaagagtcagcaattaccaaggtgataaaaaaaaagttgaagagcacagcgaagggagatgaagagacggagacggagacggagaaggggaagggaaaggccaagccaaaggtgaaggatacagcaaagggagatgaagagaaggggaagggaaaggccaagggaaaggcgaagacgaagggaaagaagaagtagaagttcaatatctcggagtttagttttttcttcagttttcaatttcaatttcaagtctcaggtttcttccctctttctaccacaaatggattccaattctcctcacatcttcattgatcgtttaatcgctgaattgtcacagccggcactgtcaaagactataaaaccactgatgctaacattgcactgtctgtttccaaatgacttcctccctgctcttgatatcctcgatcgcaaactagtacgtcggattgtacgctcagatcgatcttccacatcccagatccaagaggacattttcatcgtattatctacatcaattccgccttcacttcccggctcctcaatcccctcccaagaaaagggctatgaggttaggctgcgtgcctggaattgcagctgtcctacatttaccctgtctgcataccgagaccctcaactcctgcatgattcgacaaacaaacagaaccagttggcctactcatttggcggaaccttagctcgtggtacggctcgggtgtcgcctcctacctgcaaacatattctcgcctgtattctacatgcacggtgccctgagctgttcggggttgatggggatgacaggctcgccgtttccaaggaggaactggcaggctggtgtgctggttggggtggttgatttgcttggctcttgacacgtcaacgcaaatggatgtacgatgaattttacgcacttgtgtttgtccttgaccctgcggcaagctgctaagcgaccttatgaaacccatcctaggtatctgcagatgacaacaagtcctacagacccttgtccattccacatgagccatctgcccgtgtccggacaatcaatcgttcaaagtcggctggccccgaatggagacttgtcccggagctcttaagattgcgggatgattgtatgatagatacaccaatggcagtgttattactttacgagatagttgttgttcgctgtgcaaattagacagatctaaacataggatcttggccctgactatccaatgtacatgagatacaagaaaccccggtttaaatgtggtatgtttaactgattggattgataatcctttccggaagagaataaattaagaaaagtcccctagttcttcttcttgttcttgtcggagctatcctgctcctccttctgctcggcgtttggtgggccggccttcttagcatccttgtctcccttagttccattggcctcctggtcccgcttggtgtcactctcctcttgctgctgtcggttctggatcttgttatcgattaagtcgtggaaagccgtgatagcacgaatcaagctgctgatgtagatagccatcaactggtcattagtcttgacactcatggcccgtgccaactcgctgttctcgatctgcggctcctggccgctggtccgctgcgttgccggtggggtggacagattgggaaggaggttgaaaacatcctggaggttgcccagaatggcgtggttgacgggaagttccttgtcgagaactttttggaggtattgaccgatatcgcgtagccgcagatgcaatccttgaagcgactgcagctgcgacgtgatacgggtggaaagtgtgccgactgcgacgtccctgatgtctcggaggaggtgttccacgccaatctcctctgcttcttctgcctcgattatcgacggggtgtgcacaaatgtccgggaagttgttgttccatcctgcaagtaagaaaaaaaaaccccctggttagcgctgatggcctgatggacgcttcctcggattcaatgcaaactcacatctttgatttcatccacagcgaaataagcatctgtaggtacaccaacctcctttggttgtacatcaacaataaccagcaaggggttgggcgtgtatttcttgaagagctcattgatctccaaatccgaagcgcgcagcttgggacccgagtggtaccagccgactagcttctcgcgagcattgattttcttgaacatatccctcatcgactccacgaagttgtgatctaaaaaccacaccgatgggtctttttcatcttcctcgaacgggactagagagatagaacagatgtcaactcatctcttgtatgagtttaattcatcgaagcttgcacttaccagcaaaactgtttgatacccggacattatcgcccgagttctcacccagcagcacgcctacaacacgttttttggtaccctttgctgttctcccatagtgatctgcgacggagaggaggactaacggggcaaccgtcacggagcggttgacgagggatagcgtgtccgccgtggtggcaggcatcgtcaaagggagaaaaggtgaaaaggaatcgagaggtgtgaaggatgattaaaggtcgtagatcaaataaaatccaatgaaacagcaaatcaacgcgagacaggaggatgcggtggatggagagcgatgatgcacaggtgctcttgagagctctccgccacagctgcgccatcttgaggctggaggacttagtaagcggccaccttgcactttccccggtgaactgaggaaacttggactatggaggtgtatagaatgtatatgtatagaatatagaaaagagagagtagatagagaagacagagaatatagagaatatagttatagatactgaatgtcaattgtatcagcatctaacctacacatcgcctctacaaaatgtcttcaggccattttcccccattcccccattccctcgtgaagcccgtgctctccgaacctcgggagctaagttcctcgcgaatcttccctttccccatttctccgtttccccgtctacagcttttctcttcttcagaactctccccccttacaattcacaatggctcccatcactgaagatgccctttccggcctgaagaacactatccaccagctggaggcaaaggtgtccgagcttgagaaccgtctcgccaatggcggcaagcccaagtctgtcgccgaacagatgcgcatcatcctgatgggccctcccggtgcaggtatgcgattgaactataacgggaaaaagaaaagaaaaaaaaaccgatggatattaacagtttcaaccaggcaagggtactcaagccccgaaacttaaggaaaagttctgcgcgtgccacctggtgagtagaaagtttgcatgagtacagcatgagctcttcccgctgatacatttcctgaataggctaccggagacatgctgcggtcccaggtcgcgaagaagaccgatcttggaagggaagccaagaagatcatggaccagggtggtcttgtcagcgacgagatcatgatcaacatgatcaagagcgagctggacaacaactccgagtgcaagaacgggtgcgtacatctccatttccctcccaaattcattttcttccgaggcccggctagaattaacacgagagatgaacagtttcattctggatggtttcccccggacggttgcgcaggccgagcgtctcgatgacatgcttaccgcccgtgatcagaagctccaacacgccattgagttgcagattgacgactctctgctggtggctcgtatcaccggccgtttggtccaccctgcctctggccgctcgtaccacaagatcttcaacccgcccaaggatgacatgaaggacgacatctccggcgagccgttgatccagcgctccgatgataatgccgagaccctcaccaagcgtctgtctacttaccacgcccagaccacccccgttgtcgagtactacaagaagaccggtatctggcgcggcattgatgctagccaggagcctggccaggtctggaagagcattcttggagtcttccgccagtaagcgattctgttggattgattgcatttaaaaagggggatttgggaggtgatttgggacaatttaccggtccaggctccgtgatgcctaccttttttcctatttttttctttgggcatatccgaagtatggctggtgttctcgtccacatatagacgtgggtttatcccgttgaccgccatgtatagtagtagtatgtgtgtactttttgtgagtactctttgagtaccgaatacacaagaccggtacgcattcaattggatatgtatttggtaaatcttatattctgcagtctaattccttccgacaaggcaacacacgcggagatgtgtgtatttgcctcatactagtattgttcaaacttgccctggaactcatatctaaagttgtaggggatactcagtcgactcgatcttctgaggataggccaaaccaccctgctttcgcacctcatccatgacctccataatcacgatactctcttccaacggcatgccttcactctcgagcttgccatcgcggagacaacgagcaacctcatcagcctcccagtacatacccttaccattaccagggaacgggcactgaacctcacggatctcaccagcacccttcttgggaatgatacggtagctctctggccggaaaggtgggccgaacacctgaatctcacctttagtaccctgaatacggatggtaggaccagccgagcccttctcatcgggatcagcagagacgcgaatgttggtcatggctacaccgtgcgattgctgtgggtgcgggccattcgagggcgtacttgtcgggaaacttagaatcatggttgtacactcgtctgcaccggtgaggtggtaaggagtcatctgcgagagcacagtgggtggcctcctctggtctcgaggtagggtgtggtacagagtctggaagacccaggtcagagagtagatacccactagaagagcaatcagtcaatgttttctttctcttaagcctagaaaacctacaatccaagagagcaccaccggccaaatcagggttcaccatacggtgtgtggtaccccatttcgtctcaacatcatcaccgaagctcgtatcagccacgacacggaggacctcaccgatctcacccttctggatgagcgcgcgaatctgaacgctgagggggaaatagcgagtccaaacggcttccataaggaagagattcttcttgcgggcaatctcgatgaggatcttagtctgagcagcgttgacggtgaaggctttctcacagagaacattcttgcctgcctccagcgcgagtctggcattctggtagtggtgggagtgcggagtcgcgacgtagataacatcgacattggggtcggctacgagagtctcgtagtcaccgtatgcggagcagggggttgtgattcctcgagccgagatgaattgctcggccctttccttggatgaggacgaggcgacggccacgacttggtgggctacgtcagaggcatcgcggacattcgggtcgatgagaagatcatctgtgaatgctgttcggaatgggttaattcatgggttcttgtcttatacacccaggtatgtagaagtgaaatcttactctcggcgatccagccagtggctatcaatcagttagctttgttttgttccttttcggtaatttcataacaggatctcgagatgtcatacccatgataccccatcgaacaatgtgtggcgccatgatagtaaacttgaagacaagagtcaatacaagcgttcagattgaattaaaacaaagacaagtttacataggaatgaattccgaggggaaaacaagcgggggtggagcggggcagcggggtcgtgtaggatcctatctaatgtacaacatcctacgtggatcctccgtgggtgcaacgtggatgcaacgtgatatatagttacattttgtaagtagatggactcaattcgctaattaacgccaggaagatattccctatgcaatgcaataatcggaacatacaagatcattagatctcggtcttgatgcgcatcttctgacttggagattcagtgccctaggtatggttagctctctggatatctaacacgcccaaagaaactcacttcggcttttcgtttgcccagtacagagtcgggtgtgctggtccgtgcctggcgcgtcggtgcagggccctttgtcacttcggaataacagctggcatgatacacacgacttccgaccttggttgcgtcttgccagatccagtcctgcacatcttcagaccaggtcgattcgaatttctcctggcagatggggcatggagtgtttcggagagtggcatcgttcggggctcgaatccacggctttggcggctcttgcttcgtattgccatccgcgcctgcagctccctcggcggtggtttggggatctgcagcgccgttctcatcgccagcctcgcgggatttgatccagtcctattggagttagaaataaaactacaagggatacaagagatagacataccctttcgtcaacataccagctgcgattctgagcccgccgggaagactcggtcatgcgctgattggtcttgaagtgccagtccaagtgccgggccttcatttcctttccttcgtccgtggtcaagaaacgacggccgcaagttccacatcggtttggtcgggaatcataaagagagacaataagcccaaatcgagggatcttcatagatgcggtgctcatggggactccagaggatccattaggaggaatttgagtctgagacgaagctgatggtgtaggttgcattccatggggcaagataaacggcaaattagatctaccagaaactggtgttgaagtcgaaggcgtaagagatgggggtgtcggtccactaggtagaagcccacgtgccctcaaggccgcgataagaggattctccggtgctggtggaggagggccgctttggtgatattggggcatatgaggtagcgctgccggcatttgaggaggtggggtggactgttgacgcgaagcggtagctttgatcagctcggcgagagtgttatgatttaatagttgctgaaggggttgcgagactggttgcgctggtggtgtggggatttggggaggaacggacactgcggggccaccattcgtagcagcattagggccaaccgacggtggtcttgtggcagcaagggcagagacctgatcacggacaagtttcaactgatctggggcgagctgttgtttctgtagaattgcctgaagatccaccaatgctttcaagcgttgttgggagacaggattgaatggactgttcgcaaagtcaatctttgcagaagcgatcagagcatccacgtctcgattgaggtagctcaagtcgatatcctgtcgatgagtctggggaggtgtctgtgagaacccaattagcttcagatgtgacacacaacgaaagtagccttacagaattagaataaccattattgggatactggtggttttgtggaggccgagacatgttctggggtggtgtagagctgttggaccatccagtcggagtcccatttccacgattacgactgaggatgtccggttgggccctggcctgttgttgttgcaaagccgcagtgcgtgctttgatgagagcactctcgatgttgcgtgtaatgtcgggagggaagactgggcgtgtgtccaaggagcctggggccggttgcttccatgtgttgagcatctcatccagcttcctccgagtgtttccatcaaccagagtataaacattcataaatgtctggtacatgttccggccaaggaagagggtgtaggggcttccgacgttcttaacgatggagtcggctacatagagggctggaagcttctgcaggggtggtgtctacatactggttagtactcatcctgtactacgccaaaaaaaaacatcaggagcacctactgatcgaatgtggttctccaggacccgggatatggccattgcgtgttcggtattctctttggcgatgacagtcaaagtgcggatctggattccatcattggtggttaggtcctccaaggaactcttgtagtcctccgcaatttcgtccgaaatgagaccggacattatggcgatgtgggatgagtcgagggtgatctgggattttaaagatgtcgagagaagaaatcaatatcagggcgaagttcagcacgtggtcttgatttttttcctcctgctcctttcttccactgctcttgttccttcgagtgtgtctgtttcttttcttttcttctttttcttcttcttcacttcttcctttggggtggcttctgtctgtccttctttcctgtgactatcaagactgtcttcttttcttcttaatccttgtcctcgttccaaggaacaaattctcttggatcaacgcaaagatggagaaatagtcggaacttgtaaatgcttgctagctatcttcgcgagaattgagaaaacaatagtattcaaacacttgctctcagtccaatccaacccgtgaccttccagtgcccttgtatatctactttccagtcgaataatcgccgaggggtggtgatggaagggaagaaatgcgaggccgaaaagccgcggaccgcgaaaaaaccaagcagatgcggcgaaacaaaagagactaccaagatgggtaaatgcaagaaaacagcgctgtggaggagtgaagcaatggaaattgagagttgacaagaaaaggaaaaaaaaaaaaaagagagataagtgaaatagtgaagtggtgagtgttgaggtggtgaggtggaagcgccgaagagaaagggattgtgagatagagtcatgtgatcgtggaatgacgcattcaacttctcctcgacttggactgacttaccttccttcgtacattcaatttatttgaaagagatattattacatttttcaaatatgaagcttacacttgctaccctgctagttctaccgctggcactggccggatcgctcaagtccgtcatcgtcactttccccaagggaacgcctgactcggtggttaaccaggccaaagcctctttggtggcttcagtacgcagtgcttctttgttgtcatgaggctgttatgacactgtactgacacttttagggtggtgttatcacgcacgagtaccgtaagtactacatactaccttgcacatttagatatagagataccatttcatcggtactgacatacatctcttatcagatttgatcaagtatggttccaacggacgtttctgtcttataacctgccttctaactacgactttagtggattcgccgccgaggctcctgcgagcgctctccagaccctctccacgcaggatacccaatacaaaccgaatatcgaagaagataaggttgtcagtgcgtatggagactacgcagctgcagtctaatatgccatctccaatgagataccggttctgaatctcaaagcgcctgagcatacatatcatgacgtccaaaggcaaaaccacgtcggaatgaaccaatcagaattacaccatcagaatgatttaagtgatctaacgcaacctcgaggcttggattgtatacaatgtggagtcaatggttgagtccttatgcttcagctaagggctttagggggggggggcggacatatgaatctgataagtttacatttacactcaaaaacataactacaatgtattcattattataattcaagacctaagttatgtacttcgtacagtgtacttagtagcaaatcaaagagcgtagacaacgtagggccgatcatcctcccctccccccccccgctagttaactcccgtccctctggcccccaaggcgcgtggatctggaaagtccctcgagagccgaggccttcgcgttgcaacccttcacttcgagagtcttggaaatgctggaattgctggaattgcaggcctctttgacactcgattaaacgcgccgccaaaatgggatcggaacacacggtgaccaaggttctgttggaatggatcaacagcttcgccttgggtaaaaccctccgaaccactgacgaattaaccgatgggattatcttgtgggagattctccaggatattgaccctcagtatttcctcgaggaaatcccagagcgcaactcctccgaccattgggtggccaagtggcagaacctgaagcacatccacaaactattgctcaactacattcgacaccaaaacgatgacatcctaccttccggtctcgatccgtcgcccgatctcgaatcaattgccgaaaaagcctctcccaaggaaacgaacaagctgctgaagcttctcctgatcgcggccatcagctctcccaacgccggaacatacgtacaaacacttcaggaactaagcacctcgacacaagaggggctcagagatattattgaggaggcacacaatggccaatatgagccaatggacgctgcggatgagctcagggaagacctagccaagcacgatcgccctgtggatctggaactgcagttcgaggaacgcgtcggaaaggtactcgcggagaatgaccgtctaacacacgagaagaaagaattggaaaaggccttgggggacttgcacaatcgcctggcgcgtctccaggaaaacaatgacaccctacaaaaccgtctcgcctccaccgaggaccggctggttaccttgaaatccggaaagggtgatatcggtcacaacgcaaaggcattggaaagcaagacccgtcaacaggatgatctaattgcctctcaagaagcaaagttgactgcggcccaggacgaaatcgacagtcttcgcatggcagtcgagtccttgcgcgtcaagaaccagcgctatcagaagttgcaggatgactatgacgagctccgtaccgaaaaggatcaactggctcgcaaggcaaacgcagccgagaaataccgccaaaagctgcaagccagtcaggactttgagaaagagaaccagacactcaagaaccaaatcaaagatatccagcaacagctaaaagagtcggacgcacagcagcgttggtcttcggagcgcgatgtggaactggaagaatatcgcaagcttctgccacaagttgagcaggaatgcaatgagatccagaacttgaagaaacaactcgagttcaataatcatgcgctgacagaacgattggagagcgcggatgaacagcacgagagggacgatgctttgatcagtgaactacgtgaacgcctcggagaaatagacggcttgccgggcagcgcgtcgcctggctctgagacgccaaagatgcaagggacattgcacaaggactttgaggcgcttggtgtcaaagaatcacaactgtatgtatacattttgccttcgtggtcttattggatgctaactattgacagtaaatctgaggatgatttgaagcgggaaaccgagtccgttaaagcaccttcagctgtatgtgtgccatctgttttctgtgaacgtttgttgatactaataaccagcagccagcctctcatactggaggcttctctgaaaactttactgcatccgtgcaactggcgcgctctggttccacccaaaggtatgaattcccgacatttcgttcgtttcagtgaacagaatatttaacatgccttagtgacgactactggaaattatacgagaactataccggagctctcaaaaagattgcagaggtccaggacaccttggaaacagctaaaagagacctgtctgatacacaagctgaacgtaagtcttttattgctctggctctacacatccgagagaaacatgtgtctaacaatcttgaagttggccttgtcaatgcggaacaggtcgagatgctccaaggactcgaggcgtataactcggctgaattagcaaaagtccgggatgactgggaagcccttacacaaaacgtccaccacctggaggccgaggtcgatgcaagccagacgctggtgcgtgaagtctgtgcggaacgagaggaactccgcaagatgctcgacaacaagcaaagcgagatcagctccgaagatcaggaagttatgaacgagatgcagatgcttctaggcgagtttgaaacccacaataatgagggcggcgaagtgccccagaaatcgagcttcgagctcttgaaacagtgtgcgggagttctggagaagaatgttgaacggcttgctcagcgtgccgaggtcagtttccacgagagatcctcgctacgtcttatttgggttgtgtttgctaattctagcatgattctacagtacatccagcaacaaaatgagctggtcaaatcactccgtgagcgtatgaagaactatgaagaaaacctagacgatggcatttccaaagagcgagaggtaagtcaaagatggagctgttaggttctagcggtatgctaatgacactttttagcttgagcttcagaacattatcgatagccagacccgagaactcaaccttgtgggctcggcttggtatcaccttcagagccgatggcagaacaacaatatgacggtatcgcgatatcgacatggagccagcacgggagattctaagggctggctagcaaagcaaagaagcgctgttgctgggtagtggaatgccctatgaatcaaattcgtgccatttttttttttaacatatgcgttatatttttttcgtttactggtttggatgttgagattcccactatacatcccatcttattcttgtgattatttctacagcaatagaatctatgtcatttaaagaaccccagagtcttgattgagccagatgaatccattttgaagtagagtgagttcgtcgcattcggaaaatgtaagctacctaagtagatccccgcaataaaagatgtctatggaaaatacaaaaagcctaggtaattggcctagtcccaagaaaggagaaatagaaggggtaatgcagaaattataagaaaatggtctctatacaacctggccaaaagcgggaatcaaagtctgtgccagccagaagctgaagaccagcttgggacctgtcataagcagcttgggggtcagacccttgaagaagctggtggggccctcattcttgagcatcgtggagacaatcttgaagccagactcggggttctcgaagttgcggttctggatacgcgtcttgatgacatcgaggggagcggacacgactagggaggcactagcaccgcagactgaggcgacgaagttctggccccaggtggcagtgttgtaatcggtcagtttgtaaatcttttccttggcgaaagcagatccaccgaagagctgtaacagatgttagtgggggtccagtgatagtagatcgggggaaagcatacagcgaaggacccaggggcgttacgggcggcagtccagccagcaccgcggtacagacccataccctcatcggcaataatcttgaaaagaccacgtccacggaaggcatcggggttagtctggcgcttaatcttaagaacgtccagaggaagcagaacgatctctccaatgccgatcaaactaaaagatttcgagtcagatagatccttacgcccaatttcaatttttcttaccttccagcagtggcatgcataatggcctttccggtacccttgccaaatgccttatcgaagtcggcacggtggtgcttgtcgaggtaatcgcgtgcgaaaggctgaccaccgtacttgtagatgcgctggaggacctatcgatttaaagaatagtatgagctgtctgttctcccaatcttctgctgtcgataaaatccacgaaccttgtaaccggcagcgtatcccagaccggggaacaaagaggtgaacttgcgaccaattgaggcattgacgtgctccctaaagacaacctccttgaaagcggtagcgctggagatctgtcaaggatccagtcagcaatagatacatcttcattcgtacacaatccgaatctcacccgggtctggttgctcatcaatcgcttggcggtagtgtcaacctatggacgtcagtgtctggtcgcaactggtctcgaatgggagaatatcgtacgggatggaagatcagcaactcagcaataccggcagagcctagaagagtcagatttgagtaatgagctcgtattttgaacatctgacgacttaccggaaccaaggagacgagcagtggcagactccttcttgacatccttggggacagcgccagcactggtggcaatagcggaagacattttttttccaagtttgtcaagtaatcccaaaaaagagcaagagaatgagaacgccgatggattcaggaacatgtgctcggagttaaattttatcgaggcagacttggcactagtcccgtttgggagccgccatcggagagccaaggagttgcgaaaagtcgtataaatatgtatgtatatatggaatcatatgtatagaataaaacgatgctacttaagaggtatcaggaagcaagttgcactgtctaatctatttattccgagtatatgactccatctttgtacatctttatatggaaataggtggaatcacaaccgcatcggagtcatttgaaagtgcctgaaacagattcctttgatacagcatgaccgtactccgtaaatagcacaagtgacaaactgcatcggcacttgcacagcgctaatatctgctgtgggggtgaggaactacttagggttagcgtttggaacattccatggtaactgccgaggatattcctagtataatcagatctaaatactcctcgctacctgttttgttgtttactcgttacttggctcgtggataaagaactcatattgctcctaagtgtaaatcacttcatctagcctgatcagtggttcgtttccaggtcggtgctccatcattgctcgacggtacaaccaaaacataaagaaatttgccaaaaggatccaagaatattaccacaaccagaaagctcataatgattgtagttgcagctaaagagcatagttgccaagcaatgtgaaagaaaatgcgcagaacaccgaatgaaacgccagtgacccaaaaccagtatcccaaggtcgcaaaagccttctcgcctgcccgttcatccattattgactcactcgtgcaggttagagtgaccgagcagcaaagcaaatgagagagactgaacaacctctacaggtcaccgaaagtgttctcgccagagtatctaaccgttatgtcagtatgatttcatttataaaataaaataaaaaaggagaacatacgtgatgtataagaagccatcttcgtccttgtgctcttcgtagatgctgctcatgagcgcggcagttggagggaggacctcatcaacgaagatgaagatagccttctcaggggagagctttatgcgcttgcggatcacatagacaaactgtcccacggtaaggtcggccggtactaagtacttcttcttgtcgatggtggcgatatctgacttctcgaccttctcgcagatgacctgtagattaggggagtccgttagctaccgaacaagcggtgagggtctgagagtttggcagcaacaaccacctccgttggggagatccctgggattaaagatactcacgggaatcctgtcggcgtatttctggcgaatgcgttcggcctcagcctttcgcttctcgaaggggtgctcgtccttgaacttggatcgcatcgtgactgataagggtcgataagtgagagcgggtcgcgtggagggtaagtaggatcaaaaaaaactaggaagctctggtgcgaggttggtagaaatagtggttttcttgatgggaaggtttggatgtgaagtagcttgcaaaaagagagatgaagaggggtgatagaggatgacaaggcgactcccccgctgacgttacggtaataccatcacgggatccatgggcggtgagtcaatagtcacgcggcagaaatcagatgcctcgggctctgctcacgtgaatagcaaggcatatattatttacatactgcatcagtagattaaaagagttacctcccaatatactagtcaggtcttgaatatctagacgaaaagcgatctcaatatcggggcttacacgtccacgggttattgccccggtgctgatcccggggccgcttatcgtgcttatctcatccagccaaacagaccaaactcagctctaggagagtcgtacgatttgagatgttgcgtggtattttgctaaactgttgactcaatccaacttcttcctcatatcattctttatacggatccgggataccgctctctcggtttcggccattgaccttttgatactttgtgctggcagccatacgcgcaaccaattctattccaaaatggccacccgatcatacacgcctctgcggaggtcactagggcagttgtctgctcgaagtactcgcattgctggccgccgtgctggaccctcatttcgcgggtattctacagagcagaaaccgcgtgagcccaagccattcactgtctggaggccatacttgcgcctcgccattggcgtgcctttcatcggcgggatcatatactcaatggtatgacacggcgcttcaaaatgcgaagaaatcaatttgctcattcattccagatgacagaagaagtcacggaactcgacgctccatccatggttgaggtggacgaggccctaaagcaatcgaaaatcaacgactcctcgccgatgcggttacggatggaaaagctcatcaagcaacaccagcagaagatcatcgaggaactaggcagagtcgatgggcaacaattcaagactgatacctggtcgcgccccaatggcggcggcggcatttcgtgtgtgctgcaggacggaaacgtcttcgagaaggcgggtgtcaacgtctccgtggtgtacggcaaattacctcggccggccattgagaagatgcgtgccgaccacaagtcctttgttggctcagatgtggagtcgctagatttcttcgctgccggtctctcgctggtcttgcacccacacaatcccatggctccgacggtgcatctcaactaccgctacttcgaaacgtcagatcccaaggaccctatcaacggggacaagaattggtggttcggaggtggcacggatctgactccgacctacctcttcccggaggatgctcagcacttccacaagaccattaaggatacatgcgatcgccacgatgctacatactacccccagttcaaggcctggtgtgacaagtacttctatatcccccaccgtggcgagtgccgtggcgttggaggtatcttcttcgatgacctcgacgccaacttccttcaaacatccgccggttcctcctccaacccgcaggagacactgttctcgttcgtttcggacagtctggcgtctttccttccttcctatgtgcccatcattgagcgacgcaaggacatgctgtataccccggaacagaaggagtggcagcagcttcgtcggggccgctatgtggagttcaaccttgtctatgatcgcggaactagctttggcttgcgcacacccaatgcccgtattgaaagtatcttgatgagtctccctcgtaccgctagctgggcgtacatggatcctgtctccggcacaaggacagagaacatgcctgtggatgaagatgacctgacggaggataaggccagcgagaaggagattatggatgtgctgcgccacccccgacagtgggcatgattgattcatatgtcatgcttggtatatggtgtcgtgcggtgttttcttgatttctatatgtatactacctaaaaaaactttgtagagtaaatgtggataattattgagctaggtgtctctacagccattcccacggcaagtcttaaagggcactcgagatttaatattcgggcacgaagcccagactgataaaaaaaagttttcattttcgatcgacttcggattgttagacagttgaagcaactggctctggtactatccacatctgtcttattttccgttcatataggcatatatttgtcgaccttacatcgattggtaagatggccgagttggtctaaggcgccaggttaaggtataccttgactccataactagcaatagtttcctggtctcgcaagaggcgtgggttcgaatcccactcttatcattcctttttgtttttcgctcatctaggttgcactcttttcctacttgcatttttctttttggttggacagtgggttatactatgattaaattcatcgagagttggttgtgcccgaggaactttaggccggagcttttgccgccacgcatatgaccatttttagtgatgaggttgttacaacccttgtcggatggttaattatatataatacatagtctatccagagcaatgctttattcctggttatccagtcgatctggtcatacattgctcggcgcaaataagtaatggagttgtgattgctgtctagaagaaatatagggattgtatggggatatttagatctatactcctgaggttaccccggtttacccaacatatcgggtattaggactggtctttccaatgaatatattttggttgtcaggacacatagatgatagtatatggctatcttcaactggcttttatcttaggaaaccaactgttgttctccccaaccacgcccggtaaaaagatatctccatttctgcgcgtctagtatacgctgataggtggcctgcttttgacctagaagattttgacctagaagattgccagtagagatacaaacatgtaattctcctgtatgtgccggggtgatgaatggcccgatacgaagcgaatcagtagaatagtacgcagtctagagcccaacgcatataaaaaggcatattaaaactgcaatcaacacctccccgtgagatctaccaccgtactatagcttggtggtgagcgtgatagtcctctaaaccccactatatcgactgttactactatcatggtctaaaaagatactggtttactaggaaagaacatattgaatagcataggatgtaacaccagaaatggctgtcgtggcggaatacaaatattgatttgttagtaaccattgaggtcttgggatatcggaaaatagcataatagtagcgatgactagagtccctctgtgatttcatcgttaaaccaccttcatagaaacggacaggcaagcggaaagggtgagagtcccaggcatatttgctcactggaggtattacatatgtttagtgaaatccaacgggatcctggaatccatggcatcgtcccagtgttgtcttcatggctgatctcatttagatgggttttaagatcggatcatggccccgtggtatggctgatatcttctcactagcactacaaccgaggacgacgcagccaagaaagtatgatttattcgttttcgctaaagtatctaggtcattcatgggattttggccgtttcctaggggaaaataacctagtcaatagtataaaagacttctgtactccgtatagatttcacccatggccaaattggcgaacaagcaacaactttggagcatgacctcaaaatccaccacccaccaaaaacaactcaattgatctaagaaaagctttatattaaggtggaatgagcaaaaaacaaaaggcaattcgatgacaaccccgatcaacatggtagatatgcttctctagaatcctcgcctgcaactgagccattctctctgtcgacgtcgtaccacgcagctatagtgtagtttgagaaataccgttaagatctttccatggccgagaaccgtgctttgtccctggtggcatggttacttgctctggtttccatgatgaagaccgatcgaagttcgatgtcctgtagggtatttacagttgtcacattctctggccgatgttcaatattgtgatgcgcgcgcttatgtgctgtccatagcccaatgatatggtgggttttgagggcgtgttgctagcatatatattctctctcacattggtagggactgtggggaaactcaaaatccacaaatgaattcccctacatgtatgatttggagtataataaattgaaatgaatatttattgatactaagatattcgacctgtaatgtaaaggaaaaaaataagtaaaaaaaagtaaaaaagaagtgataagagtgggattcgaacccacgcctcttgcgagaccaggaaactattgctagttatggagtcaaggtataccttaacctggcgccttagaccaactcggccatcttaccaactgatgtaaggtcgacaaatatatgcctatatgaatggaagacaatgcatacgggacgaaaccctttttaataacatggaagtatatttattgatttgagaatagtagtcgaatagcactacaaggctacaaaacatacaaggacactctgaaaaggcagacgttttactaaaaagaccacttttacgaatatcttcgtagtcaaactagcaaatccggcaaaaatgctggattattagcccaatttagcaaagacagcataagtatcacactacatatttatactatttttttgaagcatatgagatttcagctgatacctagaattatcccaggataatatcacctcgaataatccatattgtaaagaacatacaacacatggagtagccgacggacagacggggttctagccatattctgattcccataagccgaggtcaaagcccgtcgccattggaccgttacacagaacagcgtagatactatatgccgtacatgcgatgtaagagtggcattgataaaacctttagcgtaaactctgcaatgattaaaggacaggttatgataggcatgattggctcctttttgttgtttgccgtcattggtattgacggtcgtccggctgaagggttggaatggccgattcacgcaccgaacatcggatgatgttctgtctgggggttgatgtcaccaaacggattcatcggctgtcggaattcaaggctcggagaattgaattcatgtttggaataaggtgttattatggcattggttattgttcctgtcggaattgtagttccggtctccaattgagattcgaagccttgactcgacgaatgagataaaagatgagagcgatatcgatacatttatgctgtactccgtacagatcccgcgcacgttgagaaaaactgttgtattcaatgggtatcgggcctgtccataggtctaaactaattatgaagttatatgagcaaatgcatctagactacaaacaaaactttccattccgaaaaccactgcatggcagaagggtatctcaaaccttctctagtgcttcgcagtgacactgtcgccggtcagtttttcgactgcttctttggccctgttcggtggaaaggagatctggttagcccgaggtttcacatgaaaaaggaaaggtggatcgcaatgacgacagggtaaggggaaaagtgtggagaatgcgaggaaagtggcttacatgtcaccaagagcaaccatgcagaccgtctgccagatgcccagaccaatacggggagccacaccacggtagaggccgcggatgccattgttgtcgtagatgtacttgaaagtcttgccgacggtcaagttcttggggcggttagggtcaggggtcttgctctgcatctcgacacggataacctcaatcggctggttccaggcggacagaccaccaccgagagccgaagccaggatcttttcccaggcggacagcttggcgccctcatccttgttggcaaccttgcggatagccgactcagcgagacgcgacagaccgaagcgggaaccccagttggtagtctggcgaatcgcaacggcgttgacaccacggttaataccacggatgccctccttgcggtagatatccatgaaggtcgcgaaggtgccgggaggcttaacaccgctggcagccatcttgtgcttggtgatctcgaccgtcttcatgcaggtacagaaacccatcgtagcgtaggcctgagcgacaccgccagccataccaccgctgataccggagacgaagtcattggcaccgaatgagcgggcgtagtattcggcttcggaggcgacgaagaggagcaccgcacccttggtggatgcctcaatccaggcccacggaatgagtccctggtagtcttaaacatccgatctcgcaattagtttgagttcgtcacatcttgcgggtccgccccccacgcgctagctagacgtgggaaattggaagcgggtattgaatggacacttacaaccgaaaatgccgccacggccccaaatccgacccatagcgcccgcgaagctatcgccccggtttgcggccatggttgtcttggtcacctccagcggcttggggatggttagttgcaatatttattaactgaccactgagggatgccatacctgtcccaatgttgtaacctcaaacaagttcaatcctgcgcccagcaacaagttactgaacttgacaggcttcttctcgagcgtaggggccgaggccgcggacgtagttgtagacattctgggatgatggatgcgctgaaaggggccctgaccaagggatataacggggcttcgtgcgtttgaagaagggggagaactaaaaaagttgaagaagatggattgcaaatgcgtaggaagttgggtggaagggagagaaggagaggagaaggcagaatagcttataaggtcgggggaatcaaagctttgggtcagtaagctggggggggggacagctagtacctggtacatccgatcgtcaccgtttccacttatatcattgggtacccagtacctcccatcagcctcggaaggaatccacctgcgtacttcggagcagttcgcagagcacaattattatttctattttgtatatccgatcgcatgtttgtttacttttacaatatccatgttatatactatgtattctatccatttcacttctatatctttggtggcatgtggagaacgttgagcggtgtcccaacaatatccccacgtgatcgattcaacacaggtagtcctcagaccgaggcgatattctacgctgtacgttgagtcctggaatgatgtactatacaattacggaatagtgttatctttctacatatggaaggtgtagatcataaatgatttgacatggaagttctgttacaaggcccgctcgaaccgatcaagtccctatcatacaacatgaaaattaccaaagactttctcggccaaacaaaggagataatacaaatgtctaacccgggttttcaacgggccccatgggtgatattaaaaaggagatgggaaattcatgcgcttaaagcttggcaccgaccaacttggcgtaggcctcagtgctgaaagacttggggcgctcaatgggcatgccaagagcacggtcgatgatcagctggggcaggacaccaatggcacgggacacaccgaacaggacggtgtagtagctagcctcggtcaaaccgtagtactggaggaggactccagagtgggcatcgacgttggggtaggggttcttggtcttgccgtgctcggtcagaacgccgggagcgatcttgtagacctggctgaccagcttgaacagagggtcatcgggcaggtggcggagagcgaactcgcgctgggagacgtaacgggggtcagtcttgcgcagaacggcgtgaccgtaaccgggaacgacctggccgctgttaagggtggcccagaggtagtccttgatggactggtcgctaaggtcgttgccaatggaggccttcatcttggtgagccagttcaggacctcctggttagccagaccgtgaaggggaccggcaagaccctggagaccagcggacagagagagcatgggggagctcagagcactgccaaccaagtgggtggtgtgggcgctgacgttaccaccctcgtggtcggagtggatggtcaagtacagacgcatcagctcaacgaactccttgttgccgccgaagccaagctggttggccaagttgaaggcgtaatccttatccttctggacagcggcgaccttgccatctttgaagacgttgcggtagatgcgggaagcaatggtgggcagcttggcgatgaggtccatggagtcctcgaaggtgtaggtccagtactccttcttgttgacacccttggcgtaggccttggcgaaggcagactcgtgctcgagagcggtcacggccagagagaactgggccatggggtggagggtgttggggcaacgatcgatgagctcctcaacgaacttgggaacgtcggagcgggcagcccactcggcagaaaggttgtgaacctgctgctcggaggggacctcgccggtcaacagaagccagaagagaccctcgggcaagggctcctcaccaccgggagccttgggcaggagcttttggcactcgggaatctagaaataacagtgagcaagtaataaaacgaaatccgagtcaatggaaacgcacagtgtggccgcggaaacggataccctcctcggcgtcgagaacggaaccctgaggaaaaaaaatgttagcgttgtcgtttgccaggggctatcgaaatttgcgatcttacctcccaaacgagggacttgatgccacgggcaccaccgtaggcctggtcgagggtaacctcaccaataactgtgctgccgtagtccctggaacaattgaatgccatggtcagctactgtttcaatttcaaatacagagcgcgtcacatacttgcggagcttcttgaccttctcgatctgggcgggcaggttatcggcgaaggtgtccttgagggactgggcgattcaactaagttagcattccattgaagctcgctggaaggacaagcaccataccttggccttagcagagtagcagcgcgcgccgttcaaggcagcggactgcaccggcttcgcgatggaagaccggagagtggtagtaccgattctgagggaagaagccatgtctaatatcaggcaggatatgtggtgtgtgtggtatagaggagatggggaagtggtcacaaagcctgggggagaagaagaaagaaaggaaagaaattggggacgagctgttttgcgcctaagattttctcggttcttttcccatctggccgtattacagccggtaccgttggtacggtaactgggcttacttcgggacgccgtggaagctcagtcagctatagctctctctgcagggtgacatgggcttgtaattttccctacacggtacggaagagcacgggctcgggctgccggcagatcaactgtgatgctacgtaggagattgcgaaataccgagagatattaattcaggacatgtgttctttttgctatatagtaaggatatttaggtcgatgagattatgtatttatataagatttatataactactaaacagatgcacgacatattcgatttattcaccagccctgggctggcatcaacatacgtaatcaattccatgcccggggccatggatggcccgggggcattccccagttccaatgtttccaaatttcgcgggcagtactccgtactgtaaatacagttcatatcgtatctctgagaggcaggtaatgacgtcgtaaagtcgccatttgttccgtgccgccatccgtccgatatggaagtcctcgcttatcagatggatataaggacatggatgtccacggatatgtaaatatatctgtacatatgtcatagtgcatgtgatggcgccacggccttgaatagccaatcgccgatcggaagccccagggcgattcggatcccaagtcctatgttgtagggctattcattgtacaagatatacagtacaattgttgtacaacggccttttctaaaatggttcaccgaggctgggagctatatagggcggtagccaggggcagaaccggattggtaaggaccctcggctccgaggtataactagttaagacgttatgcttcatgattattggaatcatgcctgtcaaggtccttgatttctatctattactgtttagtagactctaattattttcccggtcattcctttccacggtgtaacttattatggtacataaaaatgatagtaaaacaaggacacattcatcaatatctgaaacctcaatgtttactgacatgagccctgcgctatttaaaacatagaggttggcaacaatcacctcgacctctctttttagcccctttttgctttactccgtagtgaggcctccaacttcagatatcagatataagattaaaagaccccggttacgggcagcagccaaagacgcaatttcacaattcacgtgacatatccacgataggactagcgctagtcgcagagtcttcccctttgatgacctccattgagcttcatcttcatcccccccatctcagcatccttcttcctctcgatttcatcggtttctcaacctcagttcatccgctaactgcgctggacttcactggatcctcttggactccgtaaaccctgatctggtttctctctgggatctcactgcaaagacgctctaggctgtacatctcccgtactccccgtactctcgtactcggcgctaggtaccctccctggacacaatatcgctaggctgtattccagctgtaggcggctattctctggtcgacagtgaatgcgcccgtggagtctgtagtgaagaatcgccagggactcgattaaacatatcttctttttttttttcataccgaattgacagtcgcgtcacgaaacgcagtagcccggccccctcgattacttcctatctgcataaagacttgactggggacgtgtttcattcattctttcgctactccccttccaaacggtagtatttcccgccatgtcttctgcagtagctgaactggagaaccttctccaatccatgctggccctcaagccgcctggcgtatctggctcaaagattggtggcatcacaaacttgtgcaatgccaacgtgcaggtacgcttgtcccctttggtcgattgattcatctcattggtcctgtgtgatccatgatatgctaaccctacccacagaatgaatcagttctcatccagaagatttacactcacttcaagaaggcccccggctctcacaagctgggtgtgctttatgtggtagactcagtaactcgccaatgggtagaggctgcgcgcaaggccggccaggttcctggcggtgatgcgccggatggaacttacgccgctggtgtcaagcgtgtcactgatctcttgcccatcttgatgacagatatcatcaataacgccccccatgaccaaaaggtatgtaatgagacatccctgtatcatcaaccccatatcccaggatcgcagccctggtgagatagtcaagcttcgcatattgtatccttgcctcgatgtacttcgatctgaagatcctgctgccctgaccaaaccgttttggacaagtaactgacacacatctcgtcaatttaggacaagatcaaaaagctagtcgacatctgggaacgtggtgcgacttttccggccccgatgctcgcttcgttcaaagagaagctgaacgctgctcaaagtaagtccccaatgatgtcaagatatgccaccaatactcacaatgcactagatgtcgaatcgaacacccccgaaggatcccctgcaccgaacgccaacccgatcggaatcccgcaacaatcggcgacacctgatacctcgagcatcctgaaagctttggccgatatggccaagcagaacactaccgcgcctgctgcaccttccgcacttgcgccggccaaccctctgggtgctttcaactcggcctctgtgacccctgccaatgatccaagttcgcatatggctgctgccatgaatgcactcggcgccggtggacctgtcgcgactccctttgcgggtatggccggcatggctcagaacccggctctccagccgcagagtcaaagtggaactccgatctcgatgcccgccgcgaacccgctgacctcaatgcttcctcaggctgcgcaacccgccgcacctgactcaaacgccatggcacagcagctacaacttctccagatgctcgctgctcagggaatcccccaggaccagtggggcactgccttgcagctcttcagcatgaccaacaacaatgccatgggcggtatgccgggtatgcctgggatgcctggaatgcctgcgatgcctgcgatgcccggaggaccgatggctggattcaacccgatgcaaggacagaacattggtggatggggtcactcggactcccagaacaaggacgatcgtggccgtgaataccctcgctcgccgcccactggatatcgtcgtcgttctcgttctccgggctgggatagacgccgtactgcttcgccccctcgccgtcgtgacagccctgtctatggagaatatgaatcgcctggtcgtcgtggagacccgcgtgatgctcgtggccgtcgtggtaatgagtatcgccagcgtagcccacctggtggccgtggcggtagacgtcgctcgccttcgcctgctcgtaacaaggatcccaacctccctccccctggacccaagttcattgaatgggactattcgatcggccagggtatgattaaagtcttgagccgaactcttttcgttggtggtgttacctcctccgaggcccacctgcgtcaactctttggtcagtttggaattgttcagacttgcattgtcaatgtcgacaagcgccacgcttttatcaagatggttagccggaccgatgccatgcaggcacgtgatggaatggaatcttaccgtactggcgagatgcaactcagggtaagtccttctcttgtttttattatccatggatcttatcactgaccttatcaatatagactcgttggggtgttggctttggcccccgtgactgcagcgattaccagactggagtcagcattattccgattgagcgattgaccgaggctgaccgcaagtggatgctttcggcagagtatggtggaactggtggacgtcccattgaatctggaatgattgttgaagagcccgatattgaaatcggcgcaggtgtctcctccaaggctatcagccgccgcattgccactgacactggcggcaagcggggcccaatttccactcgcactaatcccaatccccaggacactcgtttcggcggtcgccgtcctgagcgtgatggatacggtggcggtcctcagatgggtggtgaacttgacatgcctaatatgaacaatcagggagccgcacctgcagttccttcctatggtttcaacttcgctagcatgcccatgttgccccccggattcatgatgggtggtggtcagcccggtatgcccggtgcgcagcctccttccggtggccagggcaactgatttttcttgatacctcattgatgcgtgcacatatggtccaaataggttgcgcgcaccgcgcatggcaaagacgttgggggattggactttttttctttctttctatctcgaggcatatcatttcggcgggggtaggttttcgttttttctgcacttctcttacctttaatttccacaattgttcatgaggtcaccgatgattgttaaatcagatggatacattagggtcaaacaaacttatgacaaaattcaaataactcatttacatgatcccatggttccctcgtagggtttttcggcgcaatctttttagggtaaatttacagacatgtcttacttgtagtatgcatcttttaaagtgttcattgatatcgtatcgaggtcatcactaagttcaccaagctgctatttagtgtcctttcgcattccatcttcatgctcgaaagcattttcatctgtcagaaccatcaagcagtacggtccggcagagcctttaatgcctggaacgattgctcaaagtcggcaatgatatcgtcaatgtactctgtgccaaccgaaatgcggattccatcctccttgacaccggagtcacgacgctcctgctccgtgagctgctcatgggtggtggaccaggggtggatggccagggtcttagaatcgccgacactgcgatgtgttagtaaaagcattcaaaggagagcgaataagaatgaaccatacttggcaaggttcgagatcaacttgaagttgtcaacgacctgagcaccagcggcagcgccacccttgatgcccacagacagcacaccaccaaagccgcggggcaggtacttctttgcgagctcgtgactagggtggtcctccagaccgaggtatgacacccagctgacattctcgttctcccgcaaccatttagccagggcgagtgcgttggttgcgtgtcgctcgcatcgcagactcagagtctctatgccgagtatcaactgctgggcaccgaaggggttcagggtggagccgaggtcgcgcaggatctcaacgcgcactcggatagcatacgcaagcgagccgaatgtctcccagaacttcaacccgtggtaaccctcggatggctcgacgaattgggggaaccgggtagcgttcttgccccaatcaaactttccactgtcaatcacaactccagcaatggtggtaccatggccaccaatccacttagtagcactgtgcacgacaatatcggcaccgtggtcaattgggcgaacaaagtagccacctgcaccgaaggtgttatcgacctaaagtaaaaatcataagctttgtatcctcgcacgcttctcaaacaagcaacataccacaagcgggacacccttctcgtgtgcgaccttcgcaatggcctcaaagtccggaacattgtagcgggggttaccaatagactcaacgtagacagccttggtgcggtcatcaatggccgcagcaatatcctcaggattgtcaccctgaacaaacttggtattaattcccaggcgcgggagcataaccttgaactggttgtacgtgccgccatacaagttactcgtggagacgatattgtctcctgcttgggcgagggccgagatggccatgaattgggctgcctggccggaggaggcagcaacggcggcaacaccaccttctagagctgcaagtcgcttctcaaagacatcgactgttgggttcatgattcggctatagatattgccgaactctttgaggccgaacagcctcgcgccgtgggccgagtcattgaacacgtaagagctagtcgcatagattggaacagcgcgtgagtttgtggctgaatcaggttcgtgacttgagctttaggttagatttgtctttgaagtgaaattggacacttacccagcatgaagctgcagggtgtcgaagtggagattctcggacatggttcaagatatcagaatgaagtcgaggcaagagaatgtccactagttcagatttttcacactctaaggattgaactgaagacagagaaactaaagaagatcaagtggaaaaataaaaaagggacgatcttaagatggcggggagcaaatggtggggtgcagatggcgtgattgggggtttatactccgggcatgttcctgcatttgatgatacatgtatgttaggtatgtgttagctagtcttgcttcctttgagcctctttaggcaagagagactacattgaaatcgaatatcttaggcttttctgtctacgaggtatatacaacagtgaggattcgctggtgtagcccgggtgaagcccattctgctgatcaagaaagaagagagaagccatctaaaacagccgatcacacgcgggaaaagactagataaagaccaattcttccagcttgcccttgtcgaggaactcattgatcctccttctgtcaggcgaaatcattatctcagatgcctcttgactttgccagatctccggggtgtaatataagcttggcaaatcttcatagactagatggagattgctccggatgaatgtttcaaatctgaccttctccatggatgtctccttgtcggctatcttcctggaagcctcggcacgagctatagcagtcaagaaaatctggatccagaacatcttatgtgtgaccgaatcgacccgaggacctgtcattttctctgcttgctccaatgcagtttttcctggcaagccgttctctgatcccattataagcttcctatataaatatagtagcatgtgcgaatgggtggatatactgggagaatccgccattggggatccagccagtgcctgtacatcctggatgacccagattgcttggaaagaaaggcactcgatggttggcaacttagggctattctgtagcagagcagtctccatctgcttgaaaagagcggcttgcttttgggattgggatgagatggtgatgacatttggtaccggcttgaggtctggttggacaaatgccatacgtgcggaaatgctattccagaccttctccgagtaatagcgtttccaagtagacgagttcagttcgaaaagcgcgctgagagtagcggagctaatgcgtgatgcagggacgtcaactatcgacctttcactcgttgaactccctggagctgcctcaagtgactggatagcagcatgaactacttgaatccagaaataggcctgtgtttcggaataggggggaacggatgagttggtcgttctaaggcggattgtcgtcatctttagcgaatcaagtgcttccttgaccacttgaccgcgccgagcgcctgaagtgagagtgtattgaacaactgcaaaggcgtattggaggagccggtccgggttactgatttgtccgggaagagaatcatgatttagacttgatagtccaggcacgggtcgcaggtcaggaagtgaccatgactcccgtgccgtttcagaaaacatatgctccttgctgtagtatagtctccaaaggccggtgttcattaatgacggcgtgtagaggaggacttgctgaaagtcattccaggatgggaatttttctttccctgtgtggagtttgtatttcaaaatagcattctgcagttgtaggagccagaatattgtcattgttctttgatatttcagcacaagtcctttgaaaggatcatccgatttaggtctcttaccgatgctctgtatttcgaaaaagatcgggtttcatcgttctcagtctccttatatgcccaaggaaagtttccgccatatcgaacacattcttcccttccttgattgactccaaagtaataatgaagcctgacttgaggtgactgcgatggtcccaccctgtcaaatcagcactcaaaaacgaatgccaaaattgccgaggatccatattatcttcggagccttctttttcaattcgtactttgagattgtgatcatctgatgcctcctctttctgcgactgctttggaacagggtgcttagggatctgttgctgatggtgatcttgttctatgctagtgatgaaggcatgtagatcctccataacctgcttgaccccttccccagtcttgccactcacaggataatcaatgactttgcatttgacagaatcgtcgaatatttcctttaatcttttgccatataccaagcgtagatgatcaatatcttgtgcagacagagagtcttgagagtcttgagagtcttgcttgttaaagataatccataaacttctataacccaccttgagcatttctttgccaatgatagagaggagatcgaggctttcttgtgtgtattcctcatccatggtacagtcatggaagaacaagacggatgtgtctggggaacaaacgtatgctaaccaatttgggtaccgaaagcatcccactagatgcgtttagaacaaggataagttgtccagaaaggagaattgacgtacttccagtatcccagatcatatatgggtgacatttatactcaaaggattcgaggtagtggcctatggttggaaatgcatcgactgcttgaccaagaataagttgggaaagaaaggtagtcttcccagatgccgcctctccaagaataagaacttgccgttcagaatacccacggagccatttaataacgctttgcagtgccatgggagccacgtcaagagtataaaatgagaaagacagagtatcgactgctgatcagagcaacctcggctccagggcttgagctctggaggtggatgagtcagtgtactgaaatgcgctagtccggttatggcaactcttagggcatgtactacttttcacatgccaatgataacactatcctaagacaagccgtgtgcttctgtgacatagtcgatgttgaatgccgatatctgaatcagactcgatacagaagcaagttcgtcgtctgaatacacccgctcttttcaccattccagatttcagatatgtttcctagcgcaaagtgaactgagctctaacccgaacataaatgccataccaacatcgaaacaaaaatcttccgcatttcccacggtctattttagtttattaagctttactccatccatctccatttgactccattttgctccatttgactccatacatcctcaaatggattcgaaaaaagtggacccgcgcgggattgaaccacgaatctccgaggaaccgcatgaaaactcccgggggatgtttacataagctcggcgccttaaccattgggccacaggtcctatgtcgcaaacccgtcgtggattgtctacattataagatgacttcctgtatccccaacctctcccaaccccaagcccgtacaatatacagagtatcagccttggttattcacttggtttgtatgtacaagtgccagggccaccatcgcccccaatcagactgatctaatccaatgaatgatgaatgcgataaatgcgacttatggacaccacttgcattattctggagagcaaagtaaagtgaaaatcggtttatcggagtgggtcacgtgtgtggcttcagccctaccgctctacatgcaaagactacaacatcaagggcaccttgctacttgctgtatgatcactttttcgggttcttggtgtatattgcagccttgtaatatacagagtgtgataaatggttctctcgatccatacactccgatatcaaagggccaagggtacatctgtcttcatctacaacgatctgtagaaatgtcgacttgatactcttcatcatgcctggttcaattaattattgtctctggtgtgagttcaaagctaggatatgtgttgcaaatgcagcgcagatgcaggaaaccaaatagatcagccatacctatagaaacaccccctttacttgagatgcagatctctgtccaggtgagaataggttacgttctggccatctacgggatgttttggtgtcatgcaaccatatgcagtcatttaaccgatctgacctatggcgttaaatttagtctataaggggaatagttcgctgtattcttttaccatgtcatattagccgtatcattctttcgatgaaccaatcatttcaatgaacttctgtttttctttattctcgcctctcgtccggggccccgcatcccagatttcatggggaatctccagaagtcacataatccccatatgtattggccaattgaaatagaatttgaactattcccagccttctctcccaagccagttactcgtaagcgccacaaccttcctagtcagccagttctcgacgccctcggcggtggctaaccttttctagtcgcagctaagcctctagcccgtctcggcgttggccactctcggataaattgctgtagcagtcgtactttcgggaaacgggtaataccccggcgggacaggttgcatccctatccatacgatcgttgacttgtttgacaaactctcagatggcagaattagtccacgtatcacgcgcatgccatgcagctctgcaaacgcgcacaagcggtaagatataaaagaccccagtttgtcctttttgcgtttcccgagcttttgattctcattccctttttgacctggaaataacgactatttccgaaaatgtcatccgacaaaagtgatgacttgtacgagaaggctgccgttgagcaatctgaggtcttggtcaacaaggacctcatgaaggatgccttcgatggagagaaccgcgaacatgagatgacaacgtgggcggccatgaagagccacccctgggcttgcttgtgggcattcaccatgtgcttcactattgtgagtttatgctacttttctatttcccccgcatttcaggttcatctcccccggatctcgagatcatatcagctgatccatataatatctaccatcaggtgatggaatcgttcgatatgttcctaaatggtaactttgtcgcgcttcccgcgttcaaagaacggtatggcgtcgacgtcgagggacacggttacactatcccgaccaaatggcaaagctccctcttccaggccggtcaatgtggcgctttcgtcggtgttttcttggccggtcctatcaccaatcggtttggctaccgcttgactaccatcttcgccctgatccttatgaacgccaccatttttatttccttctttgtgagtaagccaaccccaacggttgaacttattctctaactgcacctaggccgactcactcactgtccttgtggtcggccaggctttagaaggtatcccttggggattctttattgcaaactcccccgcctatgccagtgagattgttcctctctccctgagaggtgcctgcacggctactcttcaaatgagttggtccatcggttcaatcattgtcgccgccgcaacctacggctacaataagcgcaacgatgagtgggcttggcgagtgcctcttgccttacaatggatctttcctgtgggtcctctcctttgaggtatgtttttacatactgactccttctagactcctctcttgatcctcctcttcttcgcccccgaatcgccttggtggctgattcgccgtggacgcaaagcagaggcccttcgttccatcgagcgtcttggtagtgaatctcatgagcaagctcagcagtcgcttgctatgatagaacgaaccgttgagatcgaagctcaaatgggcggtaccccaactcttctcgaccttctcaagggcaccgatctaagacgaactatcatcacctgtttaatctacgcgtcgcagaactttgccggtaacttgattgccaaccaggcaacttacttcttcgagcgtgagtagttcctcctctccttctaaattctcagccgcaatagatgactgactccctacttagaggccggcatgggctccgaccgttcattccaactcaatctgatcaactcgtgtcttcaattagttgccaacataatctctttacctctggcctcttcatttggtcgccgaaccatctatctctggggcacagtcaccaacatgatcctactcctgctcctcggcgtctgcgcctctatcagccagaatacagcgaccaactacgcccaggccgttctaggaatcatcatctccttcgtctttgccggtagtctcggacccatttcatacaccatcattgccgagagctcctccgtacgtcttcgcgccttgagcaccggtgtcggtcgtgccgcgtactatttcgccgagatccccatgatctatcttgcctcgcaaatgcttaaccctactgggtggaatctcgctggaaagtgtggctacgtctggggaggtaccgcttgtgtctgctttgtgtcggcctacttcttccttcctgaactcaagggccgctcttaccgtgaaagtgatatcttgttcaatcgcaagattcctgcccggaagttcaaatcgaccgttattgatgtcagggagaacgagtaaggcatgacgatatgaaggaatgagatatgcttttgtgcttctgaagcgtggtaaatcagaagaaaagcttttatttaaagaccattaagtcctctagtaaacgttgcaaccattccaccgagtagatgtgcgcaacagatacattcgcttcactctaccaatacagtggccattggtacagaggacactagcaaatctaccactaggaaggcttcatcgtaatataatatacgcagttgatgctaatagacgaaataggaagcataggtttaacactcaattcggttgtccagcgcccttatttgacatttttttaatagccatgagctagaaaattgaagtaatgctcttctacttatgagctatgtagattcttattcagtttggcgggtacctatgtaccaaggcggttaggtataaaagttcgtaacttttataggaccacatttatagttaggatggtgatattatatgtatgtcaattagaagattttattgcctataaggtggcaaatactttaaatgaacgatcacatctcggtacatttgggaacggagaaaatctagagaaatatagagcagggttacacgtggatgagctagttgcccatatgcttagctctagtcagtgaataagatacgaggtctgagcagtacagcggaaaggaaaatcgaatgaaatagcagaggatcaagtacctgtgtaggtagaaatagtaagaatagtacaaccaaaaatgccacccttgtagttaaaacaccgacgctatcaaatcacaaaaagaaaaaagaacatacatcacaacacaattgcgcgaaaactccacctgcagataggaaatctttcaccgtcccatagattgcgtcactataggataatagaagatctggtcatattggtaatacatcatcacggggaactcttcgtctcagaactcttcatttcagaattcttcgtttcagagttggcaacatcgtttggagccttttcagattgaacgattgaagctgacgttgagctctccttgtagggcttgtccgacagcttggcctcggcggcggccaacttggcattggttgcgtccaaagtcgtcttcagggccttgatgtaatcaatggccatctccacggcggtagccttgctgatagcctggttggccttttctttctccttttccttctcgttggccttgcccccggattctgcggcatccttcgcgctgcgtgcatcgatgaactcctgcggaataagaagctcaatctccttaagcgcattgttgattcgattccggcgcccctgctctgcgagcttgtgattcgtgcgcttggagctcaggttctctgccagggcctctggatagcttacacccgatggcagagtgccgtcgagaatgtgttgatagttggactttgatgcaagataaagcgcatcttgtgacatgcctataatatagtcagtataacagggatgaaattcaattctggtcaaaactcaccctcgttgcctttcataagcggctgaatgctgggactaatcttgggccgcaactgtgggctggcctgagtggaactcaaactaggtcgtttccgattagacgcagccctggtatctgatttccgagggaccggaccactaggagacggcattgcagttgtgcgtggactgggagcaagagaggcactgagaggcttatcgtgcgccgaaggactcaagaaaggtgttccattcgtggggattgacggagtccgtacagcggtgtcgatgcggttgggtctcggacgcagctgcgaaggagcggccgcctctggaagtgatatatcttccattatatcatctgggaactcaggctctgcaagctgcgcttggccgcggaattggcctgcggggtcttgcgaatgctgattccgctgaatgcgcatcaaaagcgcaggggtggcggcagtaccgggagaagagctttgaacatggggagcaattgcaggagacatccgagggggaggaagagcgggagggggcatcatcggttctgacaatggctcaggggataccgagtcctggccggaaccttcattgctgctgagctggagtgagcggatgtcctgattttgcggctttgtcgagttcatctcctgggtaaggctattgtagaactcctccgaattggtagccaaggtgctgcgtttgcgctgcgcccgaataatgggtgattgcttgaccttccgtgtgttattgagccgattagcggttgatggccgctgacgagtgttgggtttccgaataatgctaggagaaggtggagccgagcttccagggagagggttcacttccgtagttgtgggaacgaagcccatgtccgaaacctgtcttgcgtggtactggtaactgttggattcggagttttgggcctcgagggcgggagaggtgagaggtgtaaagtattcgccggggattgtgtattcggggagtcggaattggttctccaggggcgtcatagccggtgagataagaggagtgtaaagggccttgattgttagccagcaaattcattctcggatttgtgtcaagactaacctgttcctcgttcatgcgtgaatatccgtcgtacatatccgtttcgtccacgcgatgggggtatcgggcggtattgccatgcatctcgatactgttaggggtgggagggatcatgttgtggccctgcatataatgttggtgggtaggcggttgcgacataggcgatggttgctgcgcgcaaaagcctggcgtcatatggggagtcgagtaaggcattgagttgccgtggttcgtgtgcgactgtgcgttatcgttgaaatccatgaggccctccatctggcccgagtattgcatgccatgcgatcgtaggtgagccatatccgagtctgggccggtggaagttggtagggaatgggaatgttgcatattccctgttcctggtccgtgctcgatttcggggaaaggtatgttgaaatcgaacaggttggaaaattcttcctcaccaggcgcactgatgagattattctcatgcagctgctctggccacgacatggctggttgttccattttttgtaaaaggagatatccagttgggccaattaggccgagagagaactgggtgttgaagtagccacctgcagcatacagagaagatccgagaaaggaagaacccgggcaatcgggggggggggaaattgaaaagaagagaagagatgaagtggagaatcaaaaaccttcggggcggagacggtcctccgtggtcggcaacggcaccttgccactgtgttggatgttagacgaagtacgagcatacgcctttttaatcttattcctgcgctagatgcgcgtgtgcttatagtgcatgctgaaagaacctggtaaaaaagtactagcttactatggagtgctcccataggtatgttctccgtacttcgtatagtccaaatctctttttgtcccgtttaacccacagtggggatacggaatacggacaagcttccggggatatatgcatgagatttatatttctaccaaagtaagaaggagtagtaagtagtactaggtaacagttatgtagtcaactatgactcgaacatatcaacttcgagggtttcccaggtgcaggtggaatataaatccacatgcatggatacctcaggcagagattgaggggtttatcacctcgtgatatcggcttacctgagcaacaggcatgacatgatcactttagacttccccctggagagcttcgtaacctatttaacttcgcttgttcggtaatctttcctgtgagatatgccctcatgatgagacctactccagacctcccattctctcgcaaaccctccgaccatcccccatccccatccctcgatccccgcactgcaacccctgcgaccttcttcttatcgcggaatccgcatgtcgcggattgggattccagtatatcgatagatagccccgaggatgtcaaagagaatatgtatggagtacaaagcctagatacctctctgtcccaatcagaattcccatcctggccccgcaatcactccgcagaggacagcctgaagcaggcaaccgacgatttagaatcgcacctcgcacaatgccggtcaacgttaaagccgttaaactcagacaccggggaatcatctgaacatgcatcacccgctcatacagtgtctcggcccgtgaccccacttacgttgggcatccccgatgacccatcgtcgctgcccagcagccctaaatcaatatccaaccagtctttgcggccactcgacgatatctctatcacagatgaaatcaatagtcaggctatcggatctggagatgaagacgaaatgccccatgagtctccttttttgggcccaggtggggcggcctcccagcttatcatgccaagcatcaaaatgcctagtcggcgaccgttcactgagcgagggaaagctatgggacgattcaaggtccttttagctggtgctcctggtaggtttcaacagttctagagaaattacacgggctaattgtctcgaaaattaggttctggtaagacttcattgattaagtctatcgttcagacatgcgacgatatcgttcatgtcgacgccatcccacagatgacctcttcgggacgccgtagatcttgccggcctcgatctcgggggagatcgactgctactatggaaatttatgctagcaccaaaccttatccttcatggtggtcggatctggaagattcgcgcgtccttcagcggcggaaaagcatgggggaaattgtgctagagaggaatctctgtttcgtggacacgcctgcgacaaatctaagccgagcaggtcaaagtgacgctatcggggagtatatgagacaacaattcttccgtgccaccactgcgctcagtgggtctagtgttgatttccaaaatctcctagccgggaatggtggatcccaggtggatgccatcttatatttgatttctactggtaggctttttctattctatctccgagggatacatcccaaattaattcctggtcgctaaccttctacgtgcagataccctctcaacagacgtggaatgcatccgcaagctctgcgagctaagcaatgtgatcccaatagtatccaaagcagacaccctcaccccgactcaagtcactcacttgaaagtccgcttccacgaacaagctcgcgaggccggaatcaaaccattcctattcggtgatctgccgaacggtcaagatgggctcgaatcccaacccccttatgccgtctcttccgagaaatcagtcgatgccgaaacaatggatgcaagcactctaatgagtccagactacgttcaaccactcataccctccgaactagacgccctagtcacaaaaatgtttgatcgcgacaatctagcctggatgcgccattctgccgcaaagaaacttctccagcaacgcaccgactcatattcgctcccgtcctcaatgccgttacctagtgcgcagctgggtcctaccgcaaatgggtccgaatatgcatatagcagctggcgttccgtcactggaacctctatgtcgcccggctctccccccggctatgccatggcccgcatcgcagactacacccgacatgaggagcgtatggcgcaggtccgcctcgcacaatgggcgacagacctgcagcgcagcctgcagaacgagcgcaatcgatacacctcgatagcccggggcgagcgcgctatatggctcaccgagcggctaggcgagtgtgttatcgacggctcgttggtgcctctttcacagacgcctggcttctgtggcttgcatggcccgatcgacgagaagagccctggtgggttccaggtcatgcgctcacatgccggttccggggcggcgtatcgcttcgcgaagttcagtccgcatgacccgctcggcgtggttggctggattgacgaactcggacatcggagctggatgcttgttcagattgtcgggagtgtaggggttgttggtggtctggcgctctggcttgcgcgcacttggggatttccaacgcgcagtctttcggatttccgtgtcgattattggtgtggtactatggaacggtaggtcgatgagataatgagggtatgagtatgtgatattggctttatagagttagggtctcctagtttgttgtctgaagcgttcctactggatgggtttttgtttctctgctctttgtcttcggaaatcattgctatcatcttccttcggcgtcttatggccggtgtcttacggctctgggactattctccttgcggttcagggtcacgtagcatattaagatagggattacttcgcatggaagtgataaatgtgatttttatttgatttttattctgtgtgattcatcttaatccttttaccccgtctatcattgagattggacagtgtctgaactatatcgacttcgttttcgccatttccattcatagatccaaagatgctgcgatcttccatagcttggtaagatggccgagttggtccaaggcgcacggttcaggttaacctgatcccgatggtatacaactgtctccgtgtctcgaaaggggcgtgggttcaaatcccactcttatcatatctttttgcttttttgttgctagcattatcttttgcttcatagaataataacaaggatactagtctaatagtctggcagcgccttgtcatgtcgttttggtagtcttttcagcagtctccgtaaatttatagtattttctcgcccttcttagatagacggcggaaaaagacgcttaatttgtgcagacgacctccgtatgtatgacatttgattacgaacttagtaaaaaggttgttgttgcttttttttcatttaccttgctactagtgaagtatgtcgtcagaataggatgtagccaatgaacctctatctatatcaatcaaatcgacaattggcctgccaacctccagaactcacattgttgcatcgatttttttgtaaataatgctaggaatgtgtgatgtctatgtgttgcagttagatagcataggcgtgagcaagattgatataatcttagcctcggtcattactcttctgcatgaggtatactacaaacctgcatagatcttcgtcttaattaattctatgggatgataagatcaaaatccgggatattgctcgggaaaatggaagagcagggtccaacgaaagagtatgaagaagcaatggtcaatccctgcatgagattatatctcaccccaagattatggctatcacgagccaaggaaatccataggtctactggagagaatggaaatagaggataaggtacaattgtattacagtcaactacacccttaaaagaacaaaagagatatgggcaatgaatctaggcacaagtggtcacatcaaatccaaaacgaagggaacatagttttccctctctacggtgtaatgtatacagggattttaaacggtcagaccgaggtcctcggcgaagggcagctggtgaatatcacccacgctgacgagggtggctttgccagtcaggaaggtgttggcgacctacgggtaactgttagcatcatgacatcaacaatgtggatagagaaagaacatacctccttgacctgctgctcggagaccttctcgagagcctgagcaatctcgttgatctggtagggcttgttgccgtggatgaggccggaaccggtagcctcaagaccggtctcgagggtctggacggactccagagcgcggaacttggcgagagcaatagccttcttgatgtcctcggaggcgacctcaccggcggcggccttcttgagggcatcgacaacgttcttgctggcggcgccgacctgatcggcctggccggacagggtgacagtgaaaagaccggcatcggagtaggcgttgttcttggtagagacgtggagctggttgaagcccttggtggcctgcgacagaagggagaagccgggggtccacttgatagtggactcaccgcccagaagagcagcgagaacggaagcctcggccttgtagcctgcggtgccgaaagcgctggaaccggggaaggcgatcacaacagcattgccgatcttggaggcaatgcgctgctcaccaccgtagtacttggaggcgacggagggcagaacgttgtacttgctggaggcgtggctggcaggggtgtccttgaagaattgaccaacccacttagagacctcagcggagttggggccgctggcgacaagagcaatgttggacttggcgtaggcgctctgggcgaactctgcgagagcatcgccggagacgtacttctcgtaaggagaggtctgggagggggtgatagaggcgcccagaccgcggtggaaagcaacaccgtgggcggcatcgacagcaacggtctccgggttggagtggacggcctgctgcttgtacttgatgagcttgctgacaacctcgtgcaattcgtggtctaattttatggaaggggcccgagtcagcaaaagatgctcatataattgcgatccaccacgtcaaaagggactaactcacctgcaaacttggtctgggtagcaacctcggccagcaactctgtgaagtagggcagatccttggagaggaacttggtccggaggacaatgttttcgcgcgagtgtgtcgacgagatttcaccgcctagcagctcggtctcccgggtgatccgcagtgcagaccgcttgagggtagtctattgaggaattgaatgattagtatcaccaaatatacctgagatgaatcaattgatgccataagaccgaccttgaaagcgaatcgatcgagagcatcggagaacccagggaagggctggtaacgggagccagccttagcaaccagagccagggtgccagtagggccctgaacttcacggttggcgacctttacgccggaggcttcggagacatcgtactggaaggccgggttgacagcggaggccatggaccgacggccggcggccaaagcacgcggcgcatttcggctgagggaagatcgcgacagcatcgtcgcctgtgccgagaatctgtgagagaagaagaagaaatataaacccgaattgggtttgtaaagaggcgcaaatgaggcgggggaggaggtgggatgcggagagagcaagagagaagaggcagtttgggaggtcacgaaaagcttcaagatcccgactcgtcactccaaccaatcagcggtcaagtaatcaaaagcgcggacggaaccggagttacttttattgcgagtagtagttatataggacttttctattgtctttgtattgattgttatagtctaattgagcgtttttaaattcaaaatctctattctaaagaaagtcctgagtatctctattgtttcccccattgtctctgaacaacgttgctgaatgaggcatttgaatcagctgattggccatatcacgtgaatataccgataagcaaaaataagaacaaaagaacaattgcatctcatcggcggtggatttttggacctgcagatgtctgctagcttgtaaatcttcatgagcattcggtgacccttaggtgccccctctcgaggtttggtggtgaatcttctcatatctttagcccaccatgatgatgtctcaggtatgcgactgtcccgctaacctcgagagagctacttactgacatgaacgtagtgctctaccgagctttgtatgctcttgatcgaagacaattttggagagctctttgccgtgagtcatcttgtgcacacgctcgggctatcatggttctctgcgacagcggggaaggaaccgggctaactagtcaacttttcgcagcgcatctttaccgtccttcaacgttatgaaagactgactctccctcggttgagattctacgctcgcctgacagatcgccaattgcaccatggtctctccgctatgatccagcaccacctgatataccacttcacttccctcgatgatggcaatacctactacgaagctaatccacaagccgcatactccctcgtgcgatctggaaagattctccagcttgttgaaactcgattgggagaatacgcggctcaggtgttggaagcaatcatgagtctcggtcactcctcgatcgcccacctcgagacgcttccggagcttcaatccaagaggcagcgcattccgaatggggttaatcagggtgaaaatacggtcgaaaatacggtcgaagatacggtcgatgggaacggggaaaaggaagaagattcagctgctcctaacggcaatcatgttgtcagggaaaaaccggtgcaccttcatcccaccttgaagagtctcgcctctcacggatacatccatcgtcttcgagaggcacatttccaaagtccgaacgacaactggatagatgcttcccgaatcatcgcgtcaagaccagatgtcaaacaaatgaaaggcaaacagcaagcaacggagattgaggagaaggcgaaggacttggtcaaggaaagaactgaaggagatctgagcaggggcctaatatacaacggcctccctcaaggagccaaaagaaaacgcgatcatggcaactcggagtccaataagcaggcgcctaatggcactaacggtgtcaacggggaccatgtagaggacgagggggaagaggataatgattggtcggaagatgaagatggcgttgattcaatcccaatggatgtaagttttcctttttccttgccacggcttcgggtcaactaataaccattaccagtctaaccttatcgttcgggtgaactacgagaaactcgacgtggcgcttcgaaacacgcggttcctcgaccttgctaagcaagatgcaccttccgcctcagttgagatttatgactgtctgcttcgtcgcattgaataccaaacagcccgctgccgagactcttatgaaatccctcgtgaaggagaagaaggcgagcaatattctgctccaattcaactgagctcaatcgtcgaagacgttgacccgaatctggatcttacaggatgtattggcccgatggagccctcaacggtgttaaaccgaggcggcaagcgaccattggatgatgagacgaatggcgtgaatggtgacgagcatgaagatgaaccgagcgggcagaaccgcgcctatggaattgaccagcaccttagtattctctcacaacctcccttgaaccttaccacaaaacacgtcatctccgggctcccaacgtggcgagttgcattccgaggcctggcccgcaagcttcgccatttagaactggagcgcatgattgaatcacggtatggagatgtggcactgcgggtggtccgcgtcctgcatgccaagggtaagcttgacgagaaacggctccaagaaatcagtctcctaccctttaaagatttgcgccagacgcttgctagcatgcaaactggagggtttgtggacttgcaggaagtgccgcgtgacgcacagcgccagccttccaagacaatctacctgtggtactacgatccagatcgagtgtgcagcagtatgctggaggatacgtacaaagccatgtcacggtgcctgcagcgcatcaaattcgaacgtggccgcgagagagattttctcgagaagacagaacgaaccgacgtcaagggccacgaggaagaattcctctcggaggcggaattagaacatcttcgcaactggaaggccaaagaagccttgctgctggcggaggtatctcgattagatgacatggttgctgttttccgtgattattgatttgctatgtttatatcatggaggctgggaagtaattggggttgcataaatctgtacaggcgaatgagcgacgaattgatacaaatgacatttccatgctcgttctgcgagtctatacctcagacatatgttggagatatgtagccatgtttccaaggtcgctccttccaggcgtagataaggtactccgttgccttagtaagtagcatacgctcaccgccacaaaaggaatgaatacatatctcagatgtgagaaacaggctttgtctctttagctttgtctctttagctttgtctctttagctttgtctctatgtcagtgcaggatctagaattcagcattcgtccaactctttgctgataagaagctatgatgaccttcaaattacccatctctggtatttttcatagggctcctttgtgggtattttctttttattttatttccttgccttcactcttaatatgattgatagatatgataaacagccttggaagtgcacgttctatatgttataaaataatccagacattttgtataacttggggccctgttccacgaagatcggcagccccgcgtcataggcctttcacatgcaccatttagccaagaatatacgagactagcgttgaatactttactacttcgtataggcagcaaagaaagggaaaaatagcgcaatgtattaatagagaccaggcggcatagtagtgtctaaacggtaatcaaaggacatcagagaggcgcattaggcagtataaattcaaaacaaaccggcaaataaacagtcaaagaatgcgggagaaaccaaaagtggtacctattcaaggcagaaataaacccctacgtcagccctattggtatcaaaatcgccaagtctgtaaatattaatgacgctggcgcgacgccggtggctgcccgatccctgcgccttgttataccttgccataccttgcctggggttcctacaaaaagggtttttttctgacacaaatccacagataaatttatttcacattcatattcacattcacaacaacataacatcctatcgaagatggccctcccgtggatataccccgtccgaatcgcccaagcactcttcggcgtgatcgtgatcggtttgacaggatatggtccgttgcttcagagcaaattcttgaaaatccatgacaactgacaagtctctagtggtttcattattctacaatggatggtcatactcggataccgtcaacttcctcctcttcctcggttgctggactgcctttgtagcagtgccctacctcgtcgttgcaccgatatggttccctcgccttgcacaccgctttgtgattccggctgttgaagtgatcaccatgatcttctggtttgctgggtttatcgctctgggagcgatattgcctgcgccgaggtggtgtcatggcagtgcatgcagctcgctccaggcagcaacggtatttggggctattgaatggtgcgtgtcttctacttttggttggcgttatatgatggtacatattgacagagagctaacaatgatttgtgtggcatatagggtactttttgcggtcaccagctatttcagtattgtcgatcttatgcaccaccgcggggcagaagcgaaaacacatacgaatgtgcagatgggagtctgaagtgtttatttgacttgatttggatatgataccctttgaatagcgacctttatgtttatcttatgaatttcaaccggatcataggtctaacatgtagtgtcatttttatgactaactagtagtagctccaaggttaatctccgcaaacggcaacccggccccgccaagcccgctgccaagcatgtggctacatgattagttgccacagtagattcttatttcaggattgacaagaggaatatagaggattaactagttggatatatcgcgtggaataagatgtacatgtagtctattctatgtacgtatccttgaatgtggccatttatctcattgatctgcaatgcatgataagaggcctcggaacattcgggacctggggatgccaaagacaaccgtggatctttcaaagcctcgaattatcagcatcgtgtgctttgtaatgaagccgagttgcaagagccgataagctttttatgtaactaggtacagttcgtggtccacgggtacatactccgtagttaactaactatcgcttccaaggttacgtacaacataagccgtcttaccaccccacggtacgccactcatcccacccgtgcccaggtgggaaccagacagaaatttctcagacagaaattgtaggattttaggtatctttacatggtatacctatacaaaaggtacataacttgagatatacgtaataatagatatcgtataactaatagatatagtatcaaggaggcctgttctatttggtattgtctctaaatggcagctcgttgatggctatatacatttcttagttatgtatggtattttatattctccatataagatatctagatttattattagccaatcaactaaacgagaaatttatcattcttcctctaactagccagagggagaaaataaggtagtattaggtatacgtaccttatatgagtgggctagttatacaaaagataactaattctgacaatttctgtttggtgagaaaaattttgtttagtgggacagacccatacatttccaggtatgggagcggtaagatcaaaagatgttcggacgtagtactagtctcgtgtgttgctccaccgaggaaaaagcctgtcttcggacttcttttgcctcaatcgagtggatacttgttgcagtctctcagatcctttctttcctctctttatcccatcttcaagccaccccctcttgccctagcaaacatggctgacaagtcagagggaaagatgagcggtgaattgcctgtgcaagtccaagcacagagcattgcctatgatatcgactatgagaagttcggtgcccagcgtgaggcgaacccgctgccggatctcaagcggcagttgaagagcagacatttacagatgattgccattggtgagttatgatgagctatatatcatcgatcaggatcttcaggctaatgctcttcgaaggcggcacaataggtaccggtttattcattggtagcggcaccgccattgctcacggaggccccgtgggcgctctcatcgcttatatcttcgttggatcgatcgtgtactcggtcatgaccgccctcggagagatcgcaacatatatcccgattcctggcgccttcacctcgtacgctgctcgcctgattgaccctagtttgggctttgctatgggttggatctattggttctcatgggcatcaacatttgcgctggaattaactgcaaccggtttgattatccagttctgggacagcaacattcccatcgctatcttcatcggcgtgttctgggtcgtcattatcgttttcaacatgatgcctgtggccttttatggtgaaatcgagttttggttcgcgagtatcaaggtcattaccgtgattggcttcatgatcttcgcgatttgtatgaatgccggtgtcggtaaagaagggtatctcggtttccgatactgggtgcacccaggtccattcgtcccctacttgattgaaggaaacgattcgttggccaagtttgttggattctggtcgacgcttattcaggccggattttcctaccagggaaccgaactggttggtattgcggccggtgagaccgagaaccctcgcaagaccgtcccatctgctattcgcaaaaccttcttccgtatcgtcttcttcttcatcctgacaatcttcttcctcggaattctcgtgccctctagcgaccccggtctattggctagtcagggagatggtgcttctgctcagaacgccaacgcttcgcccttcgtcattgccgccaaccgtgccggtgtcgcggctctccccagtatcatcaacgccgttcttctaaccgtggtactttcagcggccaactccaacgtctacagcgggagccgtattctggtgggtctggcccaggaaggtttcgcccctcattggttcaagattaccagcaagcacggtgtcccttactacagtgtgctcttcacggcggcctttggtctgctcggattcttgaacgtctccgatgcaggtagcacagtgttcacctggttactccagatctcgggtgtggctggtttcatcacctggtcttcactgaacgcctgccaccttgccttccaacgggcgcttaaggctcgtaacatctctcgggatatcctgccttacaaggccatctggcagccctggtactcgtggtatggtctgttcttcaattgtctgatcattctcacccagggattcactgcctttatcccgaacttccaagtcaaggatttcttcatcaactacctgagcttgattttgttcgtggtgctatatgcgggacacaggatcatttaccgacctccctttgtcaagcccattgaagctgacctggataccggtcgtaccactgctgataatgagacatgggagactatcgagccaaccacatggcaaggcaaggcatggaagtggatttgcgattaattagatactgctgatctgtatattagttttttctttgcatattgcatattgcatattgtataggtgttatctttttctttcttttttcaatgtttatattccaacaatatatctacatcttcatacattatacttatacaatataccatctcggtccatgtgaaaatcagtgcatgtgagttgtccagcaaattgggtggaatatgtaagcagctccactcgggtaggtacctgagatactatatgaggtaccactctgtggcaagtacccaaaaacagccgaggtcccttgttcggctcatgtctttcatgtcccaaaagagtcggttgctccgggtttgttgcgactccagttttctcccccacactctttgccccctttaatatccggatcactcgggcattccttcctttctctcttttcttactcacatagatatccggttcgtcggcctgttgttatcactcattctctcgctgaccacagatcgctatcccgctagacatgtttttctcacaacctacccatttggctaaggccgaggagctcaagcaagcaccccccaaaggcgtcgcttactctgtggctcttcccggcaccgaacagcctggccgcagtccggtataccgagcatggaatgcgcagaaggaacttttgacaacactggaccccgaggtacagaggcgcacgcgcgaatgttagaatatctttatactgactgattttaggtcaccacggcccatgatatattcgagtcgaccgccatccgccatcccaagaatgactgccttggttggcgtccgtataactccacgaccaagtcctttgatccataccagtggctcacttacgagactgtgcagaagagacgcgccgcattcggtgctggtatagtagagctgcaccacaagcacgactgccatcgccccggccagtatggtgtcggtctctggtcccagaaccggccagaatggcagatcactggtgagtttaggttgtgagggcgaagaattcaagatattggacgctaaattgaaatcatgtacagatctggcttgcgtttcgcaatctctttactccgtctcgatctatgatgtcctgtccgaagacgctaccgaatacattatcaaccactctgagctgagctgtgttgtcacctctctacctcatatcgcctctctgatcaagctcaagccttctctcccaactttgaagatcatcatcagtttggacccattggatggtggtgagcaggccggtcactcgaagcgtgccatcttcgagtctatggccgctggtctgggcctggcgatctatactatcgatcaggttgaggagctgggtttggcctcgaagcgcggttacaatcctccttctgcttcggacattgtgactatcaactacacctccggaaccactggtccccccaagggtgtcgttctgacgcacggcaatgcggtggccgccacgtcctgcggtctgatcactatcagccaagcccgaggtgatacgtcggcctcttatctgccgctggctcatatatatgctcgtctggcagagcacaccgctttctggggtgctgcacggattggttatttccacggaaacatcgcggagttggtcgacgatttgaagttgctgaagcccaccggtttcatgtctgttcctcgtctttacagtcgttttggtagcgcgatccgtgccgcgacagttgaacagcccgggttcaagggcgctctttcgcgacacatcattgcggccaaaaccgcgaacatgaagaatcccgatccttccaaggcgaccgtcaggcacgctctgtacgatcgcatctgggctaagaaggtgactgccgctcttggtctggagcgagccagatacatggtgtctggctccgcacctttggatccgaccctacacaacttcctacgtgttgccaccggtaccgacgtccttcagggttacggcttgaccgagtcctacgcttcagctaccgctcagccggtctacgatctgactgctggcaattgtggtagtctcgcaccctgcgtcgaggcatgtctggtctccctgccagacatggagtactccgtggacgacaagccgttcccccgtggtgagctcttgctgcgcggcaacaacatgttccgcgagtactacaagaacgaggaagagactcgcagtgccatcaccgaggatggctggttccgcactggtgatgtctgcacaatcgatgagaaaggccgcttcatcatcattgaccgccgcaagaacgtgctcaagctcgcccaaggcgagtacatctctcccgagcgtcttgagggtgttgttctttccgagctgggctacatcgcccaggcctatgtccacggcgatagcttgcagaccttcctagttggcatcttcggtgtcgcgcctgacctcttcgctccatatgccagcaaggttctgggcaggaccattgcgccaacggacttggaagcggtcaaggaatctctgaacgacgacaaggtccgccgtgctgtgctccgtgaccttgagcgcgtggctaagaagcacaagtttgctggctatgagaggatccgcaatgtctctctcaaggtggagccgttcaccgttgagaacaacttgctgaccccgacgtaagtttttttcttttttttttccgtcgccgtaatcctagcattgctaacattattttctcctttctatagtctcaagctcaagcgtccccctaccgtcaaggtataccgttctcttttggatcagctctacgagcaggccgtcgaggagcaatctgctcccaaggctaagctgtagtggctccggcacttatttttatgcattattgttttccatcgtgttctcactgtggcatttggcaattcttcgcgggctcggttcaagaactgtacatagaacctgtctgtacattgtagtatattgaacattctgatagagttttggtccgcgctaccctcctctggctgtaggctactagtactagtttgggccggtcttctagcttttcttttgggtcttccttgtgagagctctttcttcatatgctgcttttatactttcgtcttttgcacatccttttcttataggtcttgcacagggcgtactactctacgccacactatgtccaacaaaaagaaaccacagtccttacctctccactgacaccataaattatcataatgttagactagctaacagaaaagcaaaaaaatctatgtccatagcctgtaaaagaaacaaaaaaacaaaaagatatgataagagtgggatttgaacccacgcccctttcgagacacggagacagttgtataccatcgggatcaggttaacctgaaccgtgcgccttggaccaactcggccatcttaccaagctatggaagatcgcagcatctttggatctatgaatggaaatggcgaaaacgaagtcgatatagttcagacactgtccaatctcaatgatagacggggtaaaaggattaagatgaatcacacagaataaaaatcaaataaaaatcacatttatcacttccatgcgaagtaatccctatcttaatatgctacgtgaccctgaaccgcaaggagaatagtcccagagccgtaagacaccggccataagacgccgaaggaagatgatagcaatgatttccgaagacaaagagcagagaaacaaaaacccatccagtaggaacgcttcagacaacaaactaggagaccctaactctataaagccaatatcacatactcataccctcattatctgaaatgaaattgaaaaaaacaaaaagatatgataagagtgggatttgaacccacgcccctttcgagacacggagacagttgtataccatcgggatcaggttaacctgaaccgtgcgccttggaccaactcggccatcttaccaagttatggaagatcgcagcatctttggatctatgaaggaaatttacctcacgctatacaggccatcaatatgttgtcgggctgagcgttgatccttgggtttcgggatatgatagcgcccatatatcattattcaaggagcgataaaatacactaacttagtatttagttggccaggtaggtcatagtcaatttttctatatatagcatgttcatcctagagtacggagtatctgcagtgcctatatatagcttaagatctggtggggcctatagagagtcatcattctaacattctattctcacttcccccaccagcattacgcccaatcctcgtttaccttatatttcattttaccttcttggccttcgcttaaaacacagctggaataaatggccgaccactccgagcccgatatcgtcttgtacgatttggcctgtactaagaacgtcagcttttctcccgttgtctggcgcattcgcctcatgctcaactataagaacattccttacaagactgttttcctcgagtttccggacattgaacccacgctaaaagaactgtgcgttacagattacccttgtgttttcatgctttccagcactgtttacacgcgaggaaacccccagctaaccccgaatcaccaagtggcctggttccagaaaagtccgcatcgggatccaaatacactgtccccgcaatccaacatgtgccaaccaatacatacattatggactcgctcccgatcgcgcagttcctagagtcgatttacccaaacccacccgtaccactaacatcagaacttggtcgggagatcgagaccaaggcacgcggtgtgcttggcaaggccatctactcgtcagtgatgccacgcgagatccgcatcttatcgccacgctcacaagagtatttccggcgcacgcgcgaagcctccctcgggcaccgtcttgaagatctccttgacgagggcaaagaagagcaggtctggagtgatgttagcgccgccatgggcgctgttggcgagctgatccggacaaacaaggcggacggaccgtttgtgctcggtgcgcggccaagctacactgatttcttcattgctggatcccttcagtctattagagtggttgatgaaggggtgtttcagaggatgatcgggtaccctggctatggggaggtttatgaggcatgtctgtcttacatgggaaagagggattgattgaatcacggtctagactactttcaatgtattgtcggtcgggtcaaatgtcggtcgccaaatctaggaggtacacacaaatatgaagtgttggtcaggcaatgccacgcttgctaatttaattatacaagtttgaaggaaaggctgtgactttgatgtgcatgtatagccttggatatatatatgttggtctgtcgatggtccaactgcatattaacaacggttaactgaaggatatattactcaaggatagtaaagcaagatacaattatagtgttgacttataccacctaaggagttgacaagtaaagcagtataatgaatagcagcatgtctggttctgaaagcctgatttagtcatggggtcaggatcttattagctatctaagattttaagaataaaaaaatctctttaatttataaagctatatactatttttaagtacctaaggctaccttctaccgctacttctaggatatttaaaactagataattttatatactaacttattttgcggagcgaagcgaagcaattaaaaaaaataaccctctccccttcctagggggggtcgaatggcccccggagggaacgcctcgaaaggagatcatgtgaccaggcgctctctctactgggtcgaaaaaaatagaaatccagtcggtgaaaaagtaatcgctgagaaacggcagaatagatccagctggcagaaaaaaaaacaatctatctaatcagagtatatactaatcctaatgcagttagacaatagtattatgcgatatctactctgtagttagtatatagctaggccttcgtatctttctctcagctataagaccctacctatttattattatggattctggactatactctcaatatcggtatatacgccctatatatatatttcacttacatacaaatcgagagatccaatcgagagcgggcgcgaaagtggtttaaagtagtggtatagaggaagaaaaacaaataatgtagtttgtcttagacgaaataaatcggaaaattttttttttttatttacactgtttacattgtttatttacatatggcggcatgaaaaaagagcagttagtcgtttcgttctgcacaactatctcgcggccgcaggccggcgagatccctcgtattctttaaaggtattaagtactatatagttctctaagtcttctaatctctcctatatctattctatatatcttnnnnnnnnnnnnnnnnnnnnnnnnnnnnnnnnnnnnnnnnnnnnnnnnnnnnnnnnnnnnnnnnnnnnnnnacctatttattttatttacactgtttacattgtttatttacatatggcggcatgaaaaaagagcagttagtcgtttcgttctgcacaactatctcgcggccgcaggccggcgagatccctcgtagaatgaggatctgccacgcacgaccctaaaatgtatcaaccgcccaattctacatcaaaacacgaaaaacaagtcaattgagccgagaaaagctttagattgagaaaaaaacaaaaaagtaatatgataagagtgggatttgaacccacgcctcttgcgagaccaggaaactattgctagttgtagagtcaaggtataccttaacctggcgccttagaccaactcggccatcttaccaattcatgaaaggtcgatgagattatggctatatgaccggaaacctgtttcagctatcctggagtaataaaacctggagtctatgaattgaagtcaaagtactggagattcgagggtaatatacaggatagaatgagcatcaggctagttctgtagtggacttcgatccgtgaagcgatgataatatgggctaaagcagggcctactgaaggtcataggcatcgctagccaccttgtcccgtcgaatatttgccaacacatccaaagatatccggacacatccaacaataaatttgcctgactattttgattcaatcacagcgagatgggagacaattggacttgtcttcgccctattgggaacagcattattccatacacctgaagatgacccggtcttcacacatcgcaacccgtggaaacttgcaaagagcaatctcagaaataccgcaaccgccattggaaatatttgttgccaactttgcaatggtgttggaacgattagcgatccattttgctggctcatgacccagaactagttctcttgacttcgatgtttggcaacagcggtaatcaccctttaatagtacccactggaaaagaaacgaatgactgaaagtcggatagattatagggtctggcaaaagctcggcgatctatctaccattgtttacgcatttggtttgcatcaatccggtgaagacatcaaagaaaactttccgttcttcttggtggagatacgaaagcgagtcatggtgtgcgcatacgcaattgataaagagttagcgatctctttggggcgtcccccacggatatgctctcgatattgttgtattccgcttccgttagacataagttatgacaagatgatcatcccacaaagcgaaggagaaaaggaaatgcagaatctcgacgcgcatggttggaacaccgaaggaggtctgaccgttggcgttaggctgcgcgtcgtgctactaacgagcttgttacgggaaagtatttagaattgtctttgagtcctactactcaacatattgcagccagagttgagttcgtatcccattatagactttcttatattgataaagtgactgacaaaagaaaccgcacagaaaattgattcagcaatcccgccagatgcaaaaagaccttcccttattcttgcaacggtcccccgaagaagctgcagcaggtgcttacagatctgcacgagacgaaggccgtgccttcgctcacatataattcacgtaccaggagtttctgctacatcggatcttgctcaagcgccttgggatcaactcgcgaggactcatcgaaagctctttggaaatagttactactctattagacattattgccatgcagacccagtctgctcacttggtggcgaatatgtcgtgggatgtaagtctgctctggccccctcaatactgccatgaaacgtttattataagctcatcattttctagttatgctatattggtcttcctgcagcaggaatcctgacttcgaaactgctctcagggcatagccctcagatatcgaatctattaccagccccgttacctgccaacattcgttcatttgctatccaaaagcttaatctttttgtctctcatctgatcttcctggtacggccgcacgaagggagttacgagatgggagttacgagattgcccaacaagggtcgagatttattcgtcgggtactcgatcgtattatttcacctaaatatccccaactgcctccggtgactccggatattgatctgtctgaaaattggctcgactgttatgatttggatggtaatcttgatttcatggcgtggcttgacaacatccactgggcgcaggaccctttattaaatttcacctgactgaatcatccaatatatgccttcatgagacgcacatcaggattatgcttctcgcaacactaccttcggccattttcaaggtctattgttttcttctctttgaataaactaccgctcatgcggattatcctgtattatgtacagagctctatacggcagaagggctgctctaggaaccaaaattgccaagtcgtctaatacaaccgagctttgaacttatgtcacgtacatagattcgaatagatctaaaagagcaagaatttgtgtcataatctgtatgattatcaataatgttactctacggatcgtgatcattgtttgcttgtttgcttgtttcttattcgctattcgctatttgctatttgcttctttattttgctcatatatttcttgcacaatacctagccagagtgaaataaagccagaaggacacagagataaacctggcggctaggcaggcaggtacccctccttcgcaagactaatctaagcgtgaaagcgtaagcggctaatttctaggggagatatctcctttggaccgcgaagagactggacagggtatatttcgtaacgttgaatgtcaagtggctgaggcggatcaccagcaggcatgggggaaataatctcagtctgcgtgcatcttgggatcccttgacggtcatttctgtaaagttcgaggactccactgactgagttattggcatgcttcgtccacttaacaagaataccgattttgatcgctctgtttccactaatgagtaaccgattcatgtcatcaagaaggtcattggtattggtagctcaggggaaagaaagatgatatattattcctctcgtgggtaacagtcattatacgactcgctccatccaacctctgcgacaagagttggaaaggcctgcgatggggtgtgaagaaaagcatctggctcctttcggagcccgcgatttggaccttctgtgaatgacagtgctttggacatagtattagtaaggttacgatcaaagtcgtcagttgaactcacttgtgcctatctgaagaaggacaaggtctagctctgctaggttcaggaaacctatcgtgcaggctctggaaattgagactgaaatccattcgtcaatacaattatgggcataagttagcatcattttgagtcgtaaacaacggctttctgggctataggattttcgaatagaaggaagatccttctcgacttcccagaggaaatcctcccaccctggtggcatgtcggtaatcaccagctcatgaaagcccttagcctcacgaagagtattgtgaatagcctcctcgaactgtggctgtcttgaactgatctgcggagaccacagtccacgatgagacgctcgacggagctaaagaaatattaggcattgcgatggcatggggacagaagtgatataaggcgagaagagaagagtagggtgttgaagaacagtatatgtattgcaactgagcggctcatagatggcgtgttcggaagaacagtttatccagacccggaacggatggtctatcacatttgtaggaacgctgatacggatggtaatatgcttcggagacaggcggtaaggagagtcctagtcggatgttgcatggtggagcaatggggccgcctcattcagaatattatgtggcgtatttgattccggcaacccgagcagttgttgaagtacttgttgaagtacttatttaagcagttgttagagcagttgttagagcagttgttgaagtagttgtcgttgaagcagtcgttgacgatgaagtagttaatgtgataaaagtgtgtagtctaacactaaccgtaactagttatagttagttagagggcggtaagctgagtcccggaaagtcaggcaggagggggggttccttgtcacaatcccctagtgttagagcacagctttcgatagaaaaagggaaccttccaatgccaagtgacttccaaacgtgaaagaccactgaggcaatccctagctatcttagttactaccaatgaaatgatcccatggatgatcgctgtactgtctttcatagcaagggctccattcccaaaatgacatatggtattttagataaatcaaattcaatgagtttccttaagaggccctccacagtatattatctatagcttaagttttatcttatagattgcatctcatactcctcctcttcctccactttcaacttttgcggttggcgaataatcagacattgcgagtgctggctatcctgcgagtccgactgccgggaaataggcatatcaacatcgtccccctcttctcggtttattgagcaggcatgagattggttggtcaatgcactattcctagttggtgtgaaatacgaattttggcccttgctgttcgtgacgccctgcccccatcctgtgttgaataaaataacaaacggcttcagacatggcacagtggaaaccataatgctgcagtggaggagaacggcggtcgcgattattgagtccgatagatgcagaggcgcgtcggtatggaaaagcgagcggttgagataggtttggcggagtataatcaaaatgataagcctaaacatctcagaaacatgattagccattgtagttcttaattgccttcatctttgtgatatcagaactcacggggccctcgtcccaaacgcaaaaaccacctcccacttttgcttccatcgcatctgaaccccccatactagtgaaacacacagtccaaaggcaagaatatcggtaatcacatcaaaaacagtgatgattttccaagaaatcgcctgatctcacttgtcagctgtgttgctctatgtgagcaagtataacgtacaaaattattacaatgttgggccatggtgaattggtatcgtggaaagcaactcagagcaacagcaataatcgaagcagacatccacaccgtcactatgcccagaagcatattggaatagagcaagtatctctttttctggcccagttgtttgagaagtaaacatatggaaatcttggccgcgccgtgcccagcaagaaataggaaattcgctgcataaacgccctgaatcgatatttgttagttcctttttcttcttttatttcatgcagctttgaaggacgagattggatgttcagggaagagggagggcgacttttccagcgcgtatcaagttcgacggagagctttggccctcaggtcggcctaaaccatgagaaactgcatccatgatgcttccgacgtgggcaatggccattatctagcaagtacccgatcagccttagagacatgtcgacagaatttaatgggtgatgagattgggaaaaaaagggagggttgaaggaggggaataatatagacttacacttccggtaaacactacgacatcatcaagcttaactggtccattgaccgcgagacgcatgtatagtcggaccaaactcactatgatcatccacgtcatgaacagtgtttcaacgatgacaatcaagccacttcgattcgtgacggagactgcatagggggagacggactccatgggggcgttcaagataggcgagatgccacgacgagaaagcagagatttcacgatgggtcatggttataacttttgagagatactggggccatatttgccgcgaatgaatccgatgattaaatgagcgacaggggtcctgatagacttgatatcttgtacatgcaatcatctcccgtaataagtgtttgtgatgcatattcgaacgctatataaatcattttacttattttaaagagcagctggtcacagcgaattaattaatttaagatttaataaattacagcatatcttagcctttcagacccgaactcgattctcgagaaaagtctgatctcaagtaattatcgctctcccagtgagattagtatgcaaaggatatatatagtaatgggttaatgggttgatctgaattcagaaaaactagtatgtaaagatctaaactaggtaataaaaaataatgtattcagcacaaagtacggagtactccgtacagcctggacccatgtagttgcgaaaattagcaccagtttggtggaccttacggaacgcacagtgccaatctcggaggaagtgcaggttagtataacgatgcaccctatcagatgatcctaatatagtgcatatatataacgtagctgggattgttattctgaatggggccagatttcggcgggacggctggaggcagaccgcgggtggtacttgtgcttaaatgccccacccaagcccgaaggaagaaagattttctctttgaactaattaatcacgcaaaagagcttagtttacggagtacctctagtacaaatacagctcgtgggtcggggtggagtatgtactatgttgtatatggtgtttgaccgtgccctaatgcatcgtacttcggccgctgccaaccacaacccttgcttgttgaccagggttcgcaagatacaatatagaaaatattattactatgctagcttttttcacgtctcattatctacccctgcacgtacgttgtattaatttatttttctaaccgaaaagcactactacattctcgccttagttgcactatcattgaaaccgtattctcaattcctttatctactttctggagctctttctttcctccattttactgatatattcttcagatccggttcatttattccccccccctcattaatccgccatggggcgcgagaacggaatcatgttgaaagttcaacactccacgccggagacctcctccctggacctcccctcccagaaggcaggcacagtgcaggacaaacaagacatgtggcgagccgggcgagatcaggaactaaacgtaggtaactttattcaacctttttgagtcctcctttccaaatcaccaaaatcagagaaaaagaagaatgaaaaaaaatgacacgtcctgcagagaaatttccggtttctttcggttcttgggtttacggctgtacttatgtgcacatgggaagcagttctcttgtaggtctctctcggtaaattgatcaatgccttgactaggataaccgacttcatatattggatctgtgctgacctattgaataagtggttcatcttatgggttgactaatggtggcaaagggggtatgatctatacttatctcgggggtctggcagggttcagctttgtgattctctcaatggctgaaatggcttccatgtatgcatatcacaatacatgtcttggcgatgagattgctaacctttatttcctctctagggccccattgtccggcggccagtatcattgggtatcagaattcgcaccccctagttcccaggccctattaagttacatcactgggtggatttgcgtgttgggttggcacaccggtatcgcaggatgctgctatacagtcgccaacatgatggtcggtgtggttgccataaattaccctgacacgtatacctatgagccatggcatgtcacacttctagtcattgcggtagccctggtagccttgatgtttaacacattcctggcccagaagctccccttgatcgaaggtattatcctgattgtgcattgcttcggtttctttggaatcttgatcccactttgggtgttgtcccccaaagttcctgcctccgaggtattcggttcaatagaggaccggggtggttggggtaacaacggactctcctgtatggcggggctggttggtcccatctatgcattgattggtatgtccgcgcgctgatggatcctattttggctattgctaacgacatatgcggagaaggccccgactcagcggttcatatgggtatgtatcctgttattccccgatctatgtggggaaataactaataccagaatgcagcggaggaaattcgagatgcatcccgggtgctccccatgggcatggtctggacattgatcctcaacggatccaccggcttagtgatgataatcacatttgcgttctgtgtgggcgacattgatgcagtgcttgagtctgaaacaggctttccattcatccaggtcttcctcaatgccacaggatcagttagcgccgcaacaggcatgacagtagtgatcatgaccatgcaattttgcgcggcaatcagtaatgtcgctacaacctcccggcagatctactcttttgctcgagacaagggtcttcctttttccaatttcttggcacaggtgagttctccgacacggcccccatccattgctctaactaaaatgggggacaacaggttaacccaaccttcaccgttccactgaatgccctttgcgtcagtctcgttatcgtctctctcctctccctaatcaacattgggtcttctgtggctttcaatgctattatgtccctcggaacagctgcccttctgtcctcctacataatttccatcacttgcgttcgtcttcgacgctggcgcaaccagcccctaccaccggcacgttggagcatgggaaagttcacccccatatgtgacaccatttccatcatggtgttgctagtgatatggatctttagtttcttccccttgactaaggatgtggacccgactactatgaattggagtgtggccatctttgggggtgttgttgcggcatcactcggttattatgtgatttacgcccggagagtctacaaaggtccagtgatacgggtgaggatgttgcagcgatgattagtcatcaagtggcttcctggtcacgtgccaccaaaaggcggtgtggatatgaccgccctggccctcggcagaatccccatcgaaaggcctgagccaactggagatcgacctgattgagccatcggccgattgacagttcagtatggagcaatcatgtatccacttagaaatctagcaattccttgttttctgccgctctgccgtctgttaaaaactaggctgtcctgtcctgatgaaaatcatcagaattccctacctacatacatctcatgtcaccgccagagccgcaagctggactacccaagttcaaactagcacaagagagggaactatacaagtatgtatgtgggcaggtttccactatccccgagtgtgccggatcgcaaactaagactctatattaaaaaaaagatatcttaaacccaacgaagttttccaacctggcccaggcacgagatatgaggatgcacagaatcaacgtactacatatattccccgcttatcgccagacacagctttgacggccttcgcccaattaggagttttaaggttcaaagctcaacgcgccttgatctcactcttcggtcgggaccaacattacatcctcgcagaggccactcaaacccttactcttcaagatcatacagtggaaaatgatcgagatgccttgtggttgggttgctgcgttgtccccaagggggatggaatctgtcaacaagtcgcttccctaccgcaactcaaaccagaggataaacacgtggtagagggtatatacgtggtacctgatctgcgcgaggatgatcggtttaaccaattggacatggtcatcggctctcccaaagcaaggttctacgcaggcgcccccataatcagtcctaaagggatcaccatcggatcctactgtattatcgatgacgagccacgatccggattggacgccccgttggtaaagttcctacaaaatatggcatcgaccgtcatggagcacttggacatggcccgatccacaacggaacatcatcgtgcagagagaatgattgtgggactcggaagttttatggaaggtaaggcgacgctgcgcaatgagtgggtacaggacactggactacgcctgaatgaacagcaacataacgaaggccacctgaatatactgcagcaaaatgtacaaatcaaatctggtcttctcacaaccgtccatactcgcccgtcatcctcgccgctgcagccaaaattatcttcacagaatggttctgagcaatttatatcatcctcatccaatttgtccagtgtaccatcgcagagcctctcctcaggaccatcttcctcgtcgtcaacgaccctgtctgacaaggattcaaacgccagttttgaccagacgtcaagtctcaacaaatccgaaacacaaagtagtttctccgttcgaagcacgtcgaccgagaatctacaagctgacatgctgtctgtcggagttcgacaagtattttcacgagcagctaacatcatccgcgagtcgattgaagtcgaaggcgtcgctttcttcgatgccagcatcggatcatatggtggtctcgtcaacgatacgaagcgaaaggggccaggctccgacagcggtaccttggaaagctccatggacagcagcgatgatagcaccgaatctgattctcagaaaagctctaccgcattcgggaaggacagcacaccagagaatacgaccttgtgtgaaatcctaggcttctcgacttccactacatccagcatcaacgacgaatcaaaaggaagacttgccctccgggaagtattgttgaagacgcttctgcggcgttacccgcatggcaaaattttcaatttcagtgaagaaggatcgatgtcctcggacgaaagcagtgatggaccctgtaatagctcgttagaccgtgagagttcaaagacggccaacatcgacctcactggtaaaagaggaacaggaagtcggaaaaagacgcgcagtgccacgctcaaagaggacggaattgttctcattcgactcttcccgggagctcgcagtatcgctctccttccgatgtgggattcccaccgagctcgatggttctcgggtgctctggtgtggacgaacacacctcgacgcgtcttcacatctgagactgagctcacctatctgtcagcctttggaaatagtatcatggcggaggtgcatcgtctggatgtcgaaatgtcggagaaggcgaaaacaaatttggtcagcagtatctcacacgagttacgaagccctctccatggcattcttggtacgtcagaaatactccgagacacggcgatggacgcgcttcagcacggattagtacacacgattgaatcgtgtgggcggacattgctggacacgatcaatcacttgctggacttttcgaagataaacattgctggacttttcgaagataaacaatttccggaaggaaggaggtaacaaagccctccacggacggaaaatccatcttaaacgacacaaaaacacagacccatcgccttacagtaagcctccacgacggacacgacatagtggcatgatcagtttgaagtctgatattcagctggattccgtcctggaagaggtaatggaaagtgtcttcgcaggctacagtttctaccacagttcacaaaggtcaacgacgatagaccgtccgaatcccatagaacttgacgtattagggtcctcccagcaagcgagtcaggttagcatcatcctggatatcgacgaagctgctgaatggagattctccacccaaataggcgcctggcgccgcatcatgatgaacattttcggcaactccctgaagtacaccaaggctggctttatattagtgaagttaacgtcatcacctgtcactcatgccaaagacgccgtgcccggaggaccttctgatttcaaggtgaccctgctggtcaaggacacgggtatcgggatgagtatggagtatctgcaaaataatctattcacgccattcacacaagaagactcgcttgcccccggaaacggactcgggctcagcattgttcaccatgcggttctgtccatgggtggtcagatcgaagtcagttcactccggggtcgtggtactgaagtctcgattgaagtcattcttacccacgtacccattcaaaatgccaacttgagtccctccaaacctgagctcattttaagaatcaaagactttacacgtggcacgaccctaggacttctggagctgggatcatctgacatccacgatcgcgatacaattctctctacctctttagaaaaattgtgcaagaactggttcgagatggatgtccatatcctgactccgtcggacacttctcccccctcatgcgacttttatgttgcggtgcagaccgataccgactcggtgaatacctgggaatcgtggttgtcaaaaactcgagatggcaatattaggagtcgaatgatttcaattgtggtgatttgtcagtcgccagaggcagcacatctcatgtctgttgcggcaaaccaatcgaaccacgaggctatcgtcgaatttatcagccagccctgtggcccgcgaaagttggccaaggcatttaacatttgcatcaagcgacaacaaggtcaggaatttccgattgggaatgactctgatatagatcaacctcaagagaagaatgtgtttcagttgacgaagtcacctctggtttccagggaggatatcgacgcacaacgtgctagagatgagatggatttccaaaagcatcaggcaggaaaacaggcgatagatgatgaatatcgcaagttggagggaatgggagactcatggcaacataatgacgctcctcttcctcacactgaaagtgatgccattactttgccaattcgacagggattgtccaggaaagaggagccgacgttgacagtcttgttggttgaagacaatgatatcaatctgcagatattggtcgcacatatgaagaaagaaggatacaggtacacaattgcccgcaatggtttggaggcgtcgaacgctttcaaagcccatcctggaaagttcggagtggtcctaatgggttagttcgtctccttgttctaaataaaggactgttctgacaagcacagatatctccatgcctgtaatggacggattcgaatctgctcgccttattcgcaaggctgagcaggaataccagaacacgctcgatatttcagcaaaaggatcatttagacctgcgactattgtcgctatgaccggccttgcaagtgctagtgctcaacatgaagcttatgggtcaggaatggacctctttttaacgaaaccaatcaaacgaaaagatttattcgcggtattgaaggagagaggcccaggcgaggccagaaatccctctcaatgatataacacattaatgacggtcatgtttcatctttgatgtcaagtatatatacgattttacttgttttgtgtttgttcttcttcccaatctaccattttgtcaagattaaagattagcactaatcgttagggtacaaaggtcgttttcaccatgtcagggcctatttagaccgcttttaggcatctgacttagtgggctttcgggtgtaggtatcgtaaattatgacagcacggaataaccaggcctgatgaccctgggcaaaagaagcttttggcaccatacaaatttaattatttccatttttctaagtgtcttgtaagaaaacaagtaagatttaatgaaccaatcataggaattggagtaaaccatttagaaaatggagataataatttgtatggcgccagaagcttcttttgccaaggctctctctgtaatggtaattcacgtatccttagttatttttttttctgccaggccaaattcagacattaaggcctcattatggtgaaaacgaccttgcgcgctatgcccgccccttcgtaattggggattctggcgggtgtgcatagcgaccttgtctctattggctattaggattcgattcatccgccttaatttctgtccttcctgatgagaagttgttctatatctatattgaggtagtcagaatagtcggccgctattacggcctctatacttaacatcgcgcgtaaggatctggccggctgcaaaagtctggcccaccttgccacgaagcaaaacagtgtgtttttggaggtgtgctaagccttgggaagatagcacagaaccgcaccaatcggaagcaagcccatgaccccggagatccgtaggaccttagggcggggatttggcggacttgacgacctgtgtttttttgtcgcctatatcctctctctccgcattgaccctcgtgtcgagctcagcttccaactttcggttccaattccctgggactggaatcgaaacatttggggatcagcttgatggagagattccctctctttttttcgcattttactcttctctgtcgctattctctgtatgttgcgattgtacagaatagaaattcgccaataagtagcccctcgagctagataggatatggctacacgtattacgccatatctaactatcatgataggtgttaggcttgcagtctgttttggccgagcagattggtcaatactgaccctttgcatacgcttccccaccattcaagcctcctatttcacttgggggtcatggctagaggggctagtctcatacaatatgagtcgtagacccttgaatggacttattatggctattcggctgctggtagttatattcggtgggaatttatttgtcatgatagcctgtcgtagtatccctgagacctatccatgtaccactagcaaggatctgtactatttaggcaggagttgataagcctaccgcttcttttttattcctcttcttcatcctctcacattatgagcggcacatcttgaacactactgtttctttcttaccttcaggcctagagataatggatggtcagcaagatgctaaggctgccattgaagccttgcagcgaaggagacttcaaaaccgtatttctcagagaaaccgtcgtaagccatcaatatcgctaccttcaagtcccgtgtgaactcggattccctaattctatgcaccccaaggcaaacgacaagcagaacttcagcaacagcgactgaaggagctagaaaaacaaacgaaagggagccaacggcaaaagaatggcaatacatgtcctcctgaaagtaataatcacgactgccagatgtgcaacttggatggaaactcccagtttgaggggaagataccagctcctgtctgttttgaagaagacataccccaatctgaaggtgtggattgcgagggttacactaacattcagctcgccaagttgccagggcgaaataagagccccagcattacaagttccattcagagactaaatgatctgatgccatgatggaagaaatgccgaaatttgtactggaccacgagcccggggtttgctctttatctgatcactttggggcctcaaaagatctagagacacatcagaaacaggcaccagaagagattctgcaatattccagacagtctcaacagcaaaaatccactgtgagccgaagctctcccgtggggatggccctatacactgaaaggatgactggaaccaatgtatctacgccgacgctgccattggaggcccccgagagcctacgaagcgttatattgccgaggacaaaggtaaaatggcactacacatcagcgtcgagcgtggtaatttggcgattgtgcgtttcctgctactatatggggttgacgttaataggagggactactctgggcggacagcactgcactacacagcacacggcgcacatcaaaattgttgcagaattactcatcgcgggcgcggacccagaagctcgtgataacgagggtagaagcccgctacatgccgcggctgatgctgagtgtgagccaataatacggttgctagtgcgagagggtgcagacctaaatgcagccataggaattagcggtattagcagtagcgaggagggggatatgcctttttcatggtggattgagccgatggatgcatgttcataattatatgaaacgagcttttttcaaatacaagaacagtgagattatgatttgcctttgattcaaagtcacgattcaacttatcttaaactaaatagaccaacgatgaaagcttaagtagtgcaatgacaaaggttgacttcgtccagttcatgtagcaaatttcgtatcgggtcagcactccctatgcagtattgcgtgctcgggagagtagggtgtagggtgtattctcaatccagtacttttcccttactgcgatgtaacataacggaatttaggtacctgaagtatcgaattggggaccgggctttcggtttagttagatcaatggaatttatcgctagggggccctgattttgtgatatgcattcataaaaccaccaaaaatagattcgtttgaacaaaacaaagacggcaaacacctcatataaatctgagagataatcaagagttgttgtaaagtaatacatatatataccaaggactgcattctcatttctggagcattgctataatttacatttttgttgctcagtgtaatatcaaatggaccgacaataaaccatccaaacaattgcaatagtgaaatagcatcaaattttagctactattccaagtgagagatttgacagtccatggttcgaattcaaatatccctgcccattacgtacgtatacataggaggttatcataatgcatccctttgttgaagacatgtcatgtcatagtacattatgtgttttttgggtagagacgagcaatgtcttcgggtacacagtatctgcccctcacagttccagagactgtcaaaacttttacaccgacgtggcgcgtcaatgggtttccaccttcctagcccagatcccgaaacggggttattcacatcccgctggaacaatactggtgtcacatcggccatgcacttcaccatattcatcagcatcatgttacagtgacgggcgtgaatcttcatgaagtcttctgtcctgttcagtattgtacggaagtcccactcattccgatgtgcgaagagccacaagacaccaacacagtgaacctgatgcattactggttcaaacttagcttcgggcctgttacaagcaggccgaaacggtggctaataaagggttggctggtacttgccttcagacatggcgatgacttcgttgtctcgtggcggaggcagactccaccattcatgggtctcggttgacttgttgatcaagcttagtttctcatatggaaagctaaatcgcccggctgtattcaagctctagtgtcagagattttcaaacatgcaaggccacgatggcttactcttccaaagatcgtcccatgcatcccgacgatcctgggtaggtaatccaataaattcatgagatattagatctgagttgtattgtccccattcatattccaaaaaatctgcttcggggccttgtattgtcagttggattttgccatagctgggagatgggaacctctcttactgaatgcccacattcgccgttgacacgatgcatccgttgccgcgaaataatagcaaatcgtataaaacagcaaactgatgataaaaacagaaaagcatagaaaaaacaccgtagatggacgtatggagaagcccgcaagcttgctaatattttttgtttcactctccctatacttcaaactttcctcgagcagtggaaaatctgcgtcttcttcgtttgtatctgcaggattcacattgccattcgtaatttgctcgttcgcccgctctagcctctcgtagccagatattgtgagatgagagccggtgggttcagttaatggcaatgcagcaaaagactttatagttgccttcgatcatcgtaaacaagagttgataaacttcaacaaaattagagatttctcaatgtaataatgctttcatctaaaacttagatacccagcaacccaggatctcattttcagcattctgtcagctgaggcctagtgcggtcatccacggtaagcatttggattatggccatgtcagcacacaatatgcaagttttctaactactgcaatattcggcttcagattatagtgctttgcacaaatcggactgtggttcctcttccatgaatcaatgaccaccaggccttgtacattgttattcaagtgggtaggccttccgtatcgctctttatcaatactaaaatcctctcattagagtcacgtcatacactacctaggtatggctgaccgattcaaggaaaaggctagggtgcctttgctttattctatttctgcggccttggccttcgccgtacccgtgatcgtgtttcaagcttttcaaattgagccaagtgatgcaagatgtgatcgtctgacttatccctggtctcctgcactggatatggttgaataatactgggagacctttgagaaccatcagtttgctattaaaacctcgtatttcgggttcgaggcaacggatcaactagaggatatatggaatgaactacttccaggtatgccgaatgagattatttggccctctttctgcttttcttgctgtcaaatatagaaggagaccaaaaatatgagagctgaggactaaattcgatacagagcaccctataacgataccgtcttctcgggttgagagccttggtcatggaaattctgcagatgacccagactggattcgggatccacacgacaccagtaatctcctggcattgcctgaatacgctgtacagctcggctgtttgaattttctccgccaggtgggctaccgatccgatcgtgatttcacatacttgaaatcgttccaaggtgatgactctcttgtctgggcccgagcatatcagtgcatagagcgattacgacacgccatcatgaatttcgattgaattggcttattattggaattagcttactgatatctttgaaagtgctggggtgacgttggtgccgttacactattataatggtaatacaacaacggaagaagggttgtttagggacgtgtcatttgattttggaacactgcatcgttgtcgaaactttgaaacatagacgaatggattagagagaacggcgtcgtgagcgtcaccatgaataatctatggtggggaggaggcaatgtggtctaacagatgctcacactgatcacgcacttttttctgacagtacaatttaaaacatttaaaactatacttgtagtaattatcgccctataaagatcgtgtattatacaaacggaaccctaagcagccagagtaccatatggctgcgcttttattattgaaacaacgtaatcaagttgatccagtgttatctgcctcgtatctctcgatggaaatgatcagactgcaagaagtgtagtcaattaatagcattgcaagctaacagagaatttgaggaaaaagaacaaatagagaggggagggagaattcttcagcccacgagcaagcaagtagtatctaacccgagtaatgaggcgcaagagagccccatgatccagcctctaacaatatttctaaatctcgagcttcaggtcagccaacatttccttattcagcctcacctcctctttctggtaaatgcaaaacttgctttcacccatgccatcaacaagttcacgaatattggcaattaaggcctcagcctcggatcgtcgtgaaggaccctggccccatagagctcttgtgataatcccccgagtgttgatagcttgcggagaggttttgccgaggtgtgaacaagcatccatccactcacaaaccggccgcgcaatttcctccgcttccttatatttcccagccttgacaaagtactccgctagcatatgaagagggacaacgttcgactcgtccggccttctctccactagcatgcggacagtttcctcggcctgcgggaggttcaattcattctcgagtgtgtatattccttgctatagcccataccaccgtttgtaatcgacatcatagagtgactgaggtcgcgagtgtgccgtttcttcgtttgccagcttatttcgaagtagttgaaggagaagctgaagctttttttgctggtctgcggtattgtcggagtctattaccactgggtcgatggctagctgttccagttcggcatctgaaaagttgcccagaaaactccgggcagtgccgtagctgaaactgtcccagaagcgattgaccggtacaggtgcctcccatgaaaatgactcggccgcctcagcggtggcgatctcaccggttgagtaccgggaagatgaaacgactgtcatcctcgagatgaaagcaaagtgatgttaagagaagagtttgttcgaaggtatcggctgaaggtaaagatgactgaatcttggaaatggcgttttagcgttttattccagttatggggagcggtcagaggtgagggaagggcagcttactgtcagacaacaaagaaacgcatcgctagtatccctaaactggctaatgataaggagacaaaaatgtgaaattgtgtgctgatagacgcaatgagaaaaagattaagccaattctttctctctcgtattatttattttcatacatgacagagagagaaaaatggagatctgtagattgatttggcgccaaaagcttcatttgaaccaccctagaatgtggtgaatttatatggtgctaagcttgattttcatacatggcaagaggtcatcggacctggttattccgtgccggcataatgtacaggcataatgtacaattcggaggcaatgtacatagttaaccgtcaaacttcaggccaaatgttaggcattaaggccttaataatggtaacaaccctgggtagatgaaggaaagtgggaactaaagtattgaaattcataaggcacacatggactcttggagggccttgggcgtctaaccctactggtgctactgatgtcaagccttcgtagtacgttgtgcttcgacaaccttcgacaaccttcgatgcgcaataaccagtgccttacaacgccagcagaactagggtaccttgattccataatgaagccatgtgtaatggctgtactattcccatacctcccgaggtaactacaggcagcctaagcacaaaccacaacagtattcttttccacgattttttggaaacgaagatgatatgattattgcaaagacccgagaacaagcgttgattacatggaaagtaaaaagtccgaattttcaaaggcaccattttcccccacttcaagactcctcgagatctaaaaccctaaattaatagactaattaggcattactagtaataagtggagctaatggcagcatacttgcaagtgtgtagatgacatcgcagctagtgtgctgacgccaggctgacatgcacccatatctgcctaatatctatggcaaatgaattcatgcgtcttacacttgatagttcagccaggactggtctggctcagtggtaaatcgtagccatcttctctctcggaactctcaaatgcaattgtacaagctgcaattctcgaaataatttctcccttgaggcgaaccatggggctttctaccatttctccactcgctaggtatctttccctcgggggctcccccagagaattgcgacaatcaaattctcatgggggtggcgatgatcgttggataacactgcgaggcggtatagtctggcagagaccatccatgcgggttcatgctctggggccatgtggatcgtttcccacttgccgtacagccagcattggacccacgacgagaacgaccctcattgagccccagaccacagatggatcccctggggatctgaggtcaggattgctgtggcatcacgtaatatcgctaaccgtccatagatgggtgagtatatagatcttcggacgcctattccaagcttctctattcttaacgcacataaggggcaccctggcaaaaaggggggtcttgagtgtagaaggtcaacctctagaaattattgatccgcagtacaggaggttaccgtctgcatgattgtctcttctgtgactatctgttatttatgtttgctagatagattgttttaagtgagatgttcgaggtttgcaacgtttgcaaagagtcagctatatcaacaggctctcatttgcaacttgcttcttctttctttctttatcttcgttgtctactctctattgttgatcgatctggcgcctcaggggagtggtgctagtactgatataccatacttacaataccataccatgtttcgtgcatttgaagacaccggtctaactacttctgtgtatgcgtaatctaaaaccagacatccgtccatactcgactgttacagactgttttcttgcctctcaaccctcagcatgaacaccacaccggaacagatccttgacgtcgaagatgctctcgtttcagacaagaatccagcgcgcgatgaagatacacttgattttcaacgctgcgccagattgcacaactacctggtcgcatatgcctacatggcgcgtaatggaaccaatacgcctgatctcgacgccctagccagggagtcatggttcttcaaccagccgatcgagaatattgacgccattcgcgctcggcttgatccatcattaaactcatttcttgattcaatctatgatccgacgccgggattcttctactgggtgagcaggcttcgaatgagacttgccgacgagtctttccccctcgaagatagcgatttcgaggataaagagcggtttgtgatcatttacgacacaactcccgatctaggctcccattgtcttggtgttctctacgaccagctgaaccatcgtgcctcgttcccattgactatcgagaattcagaaagtatcgagcctgttgctgaacattgggatatgtggttccccctagagacgattcttacccaatggatctatatgctccgaatgggaaagatcacggccgatccacggaaagagagagacttatcccatgaagaagttaattcgcgacatcagattggattatggtgttggcacccatactgcgctgctcaaattgatagtacggttgctgcgatggaccgctacacggacgcgatcgaatcacggatgcagtcacttttgccaatatcccgagatacaccattttttaccgatacagacctcgatacggctttagtgccaaaggagtgctttattcgctcttttctgacccgagtgaggaccccacgtttcaagctaatcgcgccgggcctggaggttccgcacgataaagaagccttcacagcgcgtcagattttcaacgcggaaggccagggcagggatgtaccgtcattcctcctctttgcatctgcggatgataggcgcacgatcagtttcaacgaagaaatttatcgtctgttctttggatcgagaaatgatacaccattcaatgaaggtgatcctgttcccacaggattatatagtgcaacggtcaatcgattcgaatacgattctgaagagactggattccaccttttactcccattcacactacgaccgaatcttgccgacgaggacggagctaggcggagtgatggaactctagtgccatctggctcatccacgcagcttttccagcatggcgtttttcacccatttggcggagagcaccgggctcaaagattggagagactatttgatcgatggactgaattgatcgaaagtggcgtgtggacagtgggcgaaaatggcgttgagggagggatcgatatattccgggatgcagatcatggcgcctgggaggattactggattcccccatcctggtaacagtataaccgcacgaatcgacgagatagcgtccgcgtctgtgatttagtgtatggagaggcaaggggcatagtaaacagaagtaagaataaagtcatattgaagaatcaggtgtctggtggtttcctcccttgcaacctacgagttaatacgaaacaacaaaactaaacgcttgtccttagtgtgactttgagggaattgcaagcagtcattcccctacgctcttgaggctttgaaaccctgcttgcaagcatcggcatatatatgtcaagtccatcaccagataaccacacttgactcaaatgactctattcacatcttgatctaggtaatatacgaagtcaaatcggccggaagcctcttagtattcagttacatcgctttgttaacttatctaattcggaaacgtaatattaatcaagcgtgagccgtgaagggggacgagacggctctgctggggaatttcgcgcgggtatggaatatgactcttgtgcatggccatttttcgattggttgatggctttgaagcctcggtcgaagttcttgatgcaaataatggcgcataaaatggttgcagaagtcagcaccacagataccgatgcaaagaataacattatgtccttcccggctgtgacagccccgcagagaatgatgatgcggctgatgagatacacgagtaggccgaggtagcatgtcttgcaaaggttcagcggtagttcctcgtagaggcctgacagggtaggaagcaagggagctcacaatgataccaacaacgccaatggttcgctcgtgctggacaagccaaataccaagtagcatgacgatgaatgaggccggaatgaggaacattgtgagagtatactccggttccttaaagtggacatacaccaggttgtattggatgatgaagcccagcaggaagtaaaagaggagttttatcaggaccaagaagatctgtgctcatcttttgttagttcaaaggccagtgaagccgtgggtggtggaaatcacctcgtagaatagatagcgtattcgtgttttcaagctgccatgaacagacttgtagatgacccatgaatactccctatgcaaatagtatacaacgaagcacagaatcagggtgcaaaatccagtaattattgacactacaatctccgcaggctgaatctggggccagaggttgcgagtggtatccaccagagttggaaacccatagcgctggtcaaacagttgcgtgatagctcctctcatgtaaatgtactgcataatagagtacgcaaaactgcaggcatcgcagacgcagattgaaaagagaagaacattatttttgttatggatcgcatccagggcgaggatgaactcgtagaccgaggcgaatatgaaaacgcctaggttgattgggaccatgtaggctactggaacctgagtgatggtaggggtaacccatagctgccattccacgagtatatagctaggtttctggttagggtggctcgggcgaagatagggactcaggagagcatacgtcttaagggcaatagtcaggatagcctgcgtgaataacacgatacacaaccaccattcatttcttatggttggtctatacatatcaggttgcttttcttctctctcgctggatcattgaatatggaaataaatattttattttgatcttcgactatttttttctctacctccacgtgatgtcttctatgcagtgagtgtcaaaccaatgggaatcattgcggcaaagtgttaaccttcttcggtgcgactgacgcagatctttcattagtacggagtagttgtggatctctcgtacggagcatttttatggtataatacctacaacatatccattgttcatgtatttaaggagatgccaaatccgaatccaaatacatatacagttggctccaatattttcaggataccagtctttttgaatattacccccttttagtgctctacgtacacaaacagtgggacctctgaaatattgggccaaatattgcccagatgcacgtatccacatatactacggagtaccgttggcccaatatttcagggatcccatagtttatgtggtttatgtgcggtgaaaagtacttcttacaaaccgttttcaatacatacaacatttatcatacgacagatggacatgtgagatataagttatacttaaaaggttcagttctgccaattgaaaccctgggcaacgtgaaatcttggaatatatatctgaaatatcacccgaatcctatatcattactaaagaatcgaaccaattcacttagattggaaactaaactataccatgtataaaaacggtagttccgggcaaagttgttgatttagtaccgcatggatctaaggaaaggaaaaaaaaaagaagtggacgggcagcgattcgaacgctggacttttcgcatgcaaagcgaacactctaccaactgagttacgcgcccatttgatgtaaatcctgaggaactttggttatacattgcaaaagcaaataagctaaatttggctttatgctgtgagtccgaagtatcttgacttgactgttctagttcgacggagtttgggtagaaaaatttcttctatctgagtcgttattaaataatgagcaggaatattctgcgcggtaaagctgtggcctagtagaataggcagtgagagggaatccgacatgatgaaggttgtacatcgaagatatcgaaagtgatatcatctatgattacatccatggatgtacttcgcccgattatgtagacgccgataacaaattaggatcggaagttctatacttaaaatgataacttttttttacgaagactatctcctctttctcccttttctttctataacttcttggatctatctcaacgctacccagataatgccgttcgctttgatccgccagccattcaaaaagggcttggtatttctagccacaaactggcgcctccacgttaacgtttcactatgacctatgattatgatgcactattatgatgtggacgaagaataacgcgcttggaaagaaatgctgttatgtccaaggaaaccaaatagaagccactttagagagttggccagaggatactgacgaaaatagctgaggtggcttggatggggaatctggtgattttctttacttttggttttgtcgaataacactaatatatgataacttgaaacttgaataattgcattccggctattgggttctgatcgaaactcgggggttgttgcgctctctctcgctttaaatgagtaagagtaggactgatgacttgaatatccatgtttgtttgcccagtttctgctatactgaacaatgaacaatctacaataatccgtattatattatcatcgagtgctaatatagatggagctatcctctcctgtctatagcccctaattcagtgtaaatagtgagttatcgttatccttactcttctgtcaggctaaattcaaggattaaggcctagaaaaagcagctggccgctctgcaaatggtaagaaagcaaacaagacaaatataaacatcacgatgatccatagacaattgtgtagttcgtatgctgtatgtccacgaaatgctcgacaggaataaagacacttcactacaatctatttcactacaatctaccttacagtttaccgtctcagacataaaatagaaagatgccagttcttattatagaactaataaaaatgaaaagataaaaaacatcacagagggtcgtatcccatttcccatttcccgtaagacttaaaaattagcaaaaacgcaagaaggggccgaattgatctaatcaacctcctccatggtgctctcgccggtagcctcggcgggagcagcaacctcggcagcaggagcagcctcgtcctcgtcgatgttcagaccaagggagacgagcttgtgaatgcgctcggcgaagctggcgggctcctcgatggtgaagccggagaccagcagggaggtctcgaagagcagctgggtgatggacttgacggtgcggtcgttctcgccatcggcgtcaaccttcttcttaagctccttgataatgggagacttgggggagatctcgaaagtcttcttggaagacatgtaagaggacatggaggtgtcgcgaagggcctgggccttcatgatacgctccatgttggcagaccaaccgaactggccagtacggatggcgcaaggggagccaaccagcttggaggagacaacaaccttctcgaccttgtcgccgagaacgttcttgagggccttggcaagaccctcgaactccttctcctcagcctcgcgctcggtcttctcctcctcggtctcctcgagctcgaagtccttagtgatgtcgacgagcttcttgccgtcgtactccttcagctgggtgaaggcgtactcatcaatggggtcaaccaggaacagaacctcgaagttcttctgcttgagggtgtccaagaagggagagttggcaacggccttgagggactcgccggtgatgtagtacatgttcttctggtgctcgggcatgcgagtgatgtagtccgcgagggaggtcatctcatcgccggacttggtggactggtagcgcagaagcttggccagaatggggcggttctgggcgtcctcgtggataccgagcttgatgttcttgctgaaggcggcgtagaacttgtcgaacatctcgcggtcctcggaaatctcgacgaacagctcaagggtcttcttaacgatgttcttacggatgaccttcataatcttgttctgctggagagtctcacgggacaggttgaggggaagatcctcggagtcaacgacaccccggatgaagctgagccactcggggataaggtctgtgcaatcgtcggtgatgaagacacggcgaacatagagtttgatgttgttcttggtcttcttggtctcgaacaggtcgaagggagcgcgcttgggaacgaagagaatagcgcggaactcaagctgaccctcaacggagaagtgcttgacagcgaggtggtcctcccagtcgttggagagggacttgtagaaggaggcgtactcctcattggtgatatcggcggggttgcgggtccagatgggcttggtcttgttaagctcctcctcctcgaccttggactccttgatggtcttggtcttcttcttctcctttttctcctcctcatcatcgacctcctcgaccttgggcttcttctcctcatcctcctccttggtctcctcggcatcctcatcggggacctcggtctcggtctccttaaggacgtgaaggtagatggggtaggagatgaactcggagtgcttgcggacaacctccttgatgcgggcctcgttgaggtagtccaactgctcatccttcaagtgaaggataatcttggaaccacggccgagttgctcgccctcggtgtcctccttaagggtgaaagtgccaccggcggcggactcccagatgtactgctcgtcatcgttgtgcttggacacaaaggtgacacggtcagcgaccaggtaggcagagtagaaaccgacaccgaactggccgatcatggagatatcagcaccggcggacagagcctccatgaactgcttggtgccggagcgggcaattgttccaaggttgttgatgagatcctatgagagatgaatatgagtattggtggtcagatagagatggggaagagtgttttaggtaactcctgaggacaaacttacagccttggtcataccaataccggtatcgcggatggtgagggtcttgttcaccaagtcggggatgatgtcgatgcgcagatccttgttggaatcgagcttagagggatcggagagagcctcgtagcggatcttgtcgagagcatcggaggcattggagatcaactcacgaaggaaaatttccttgttagagtagacagtgttaatgatcagcgagagcagctgagagatctcagcctggaactcgaaggtctcagacatgatggcggattgtgattctgaaagagaggttgagttagaaatgatgaattgataggaattgagcagatgcagagtctgatcgagcagtgggggttggggggtgaagttgggtgaagttgggaagcggtgacggtgggaagaacaggaaggggatttatatcttacaagaaagcaaaataattagaaagaagctctgggggggatagtaaccaaagcaaaggggagagatgaggaaaaagagtagaagaggcgggccagttccttttgtgtctccaaaaaaatctggtggagagtttctacggcgatccagcaacttccatgtcgttcaggcaacgcctgcagctttctcgatgtcattctagactcttctgcttttcacttttgtttctttgtttagactaattactctaacttgcccggtttggcagctctcaccttcctttttgtctatatttttagctgagctgtgagtgcatctgaactctagaaccttccccggatgactcgtcgactcatcgactcatctcaccattaggtaagcactggttagagcgctggaggtcctcggaagtcaactttggcagtacattcgatacatttgatatatagcaacttggagattcattattccctaatccatatttagtaggctcatcattccatgatacagttgtaaccccccccttagaatatcccatttacacatcaccggaccctcatagccaaagaaatcaaaagaagcaaaatacaagaaagaccggtatggcgcaccaccgtaagaccctggagtttgctatgctagttaaaaaaagatgcgatataacgttttgcaaaagaagagcaaggaacagatcatggcagaagacaatgaaagaaaggaatatggtgcaggaaaaaaagaggatcatgaatgtcgaagacgagactcgatcccagcaaaaaaaaataaaaataaaaaaaaggaggttaaaacacaagtgcccagagggaaggaaaatagacgcaacttttccagccagcccggaccaaccaaccgctaatatgcactgtgacgggagaaaaggggaggcaatagtcacgtaacacatgtcattaggaagagacggggcaaaagaaaaaagagaatcaaaatcggagtatacagatcccgagaagatcatccgccgggaggattgctcacaggaatgcaagagtcgtgacaccgacgggaaagaagaacgtagaggatcatcaaaatcacataaggtgtttaagcagcttggggctggctagggcgacctttggcggcaacgttgccaccacggccacgaggagtgaaaccgccgcggccttcacgctggaagccaccacggccctggctgccggcgcggtcaccgcgaccacgacccgcaccaccaccacggccggcagggaaagcgttgctaccgtaagcgttaccacgtgggcggcgctcctcgacgaggatctgctcgctgccaatctggtgggggttggcagcaacggcagcggtataaccggcaggctcgttgaattcaacaaaggcacagttcttggggcggctgacatcgaagtacttcagcttgccgaaacgggccagggtctgcttaagcaggctggcatcaaccttgtcgttgacgttcttgatataggcgaggacggtctcctcaacacggggctgcgacttcttgtggccatcgccggccgtctgccagccggcttcggtggaaggggcctccggggaacgggcaacctccgcaggggcgggggtggcagcagcgggctgagcggtaggggcagcgggagcagcgggagcagcagacttgggagcagtaggaacagcaggggtaacctgagcagcaggagcagcctgggcagccgaagccttggcggcagcagcggccttagctgcgaaagaggtagtcgcaatgctagcccaggtcttaggagcagcgggagcggttgaggtctccttctcaggaacctcccccttctcggcaataggagagggctcaggggtggcgggctcctcgtcgttcaggttttcagcctcgacggcaagaaccgcagctggagccgcctcctcagcggggacaccgttagtctgaggagcggcctccttgggctcctcaacctgctcgttggcctcgacctcctcaagcttctcatcgacgtctgagagagttacttcatcaatcacctggtgctcctcagcgggaacctcggcaacagcctcaggagcttcagcagtaggcgcagccggggtgggctgctcgggttcttcttctggctcttcggccatgtaccggaagatgtcgttaagcacatagtagccgttgggctgctcggcgaggacgaaagtctgcacgaacttgcgggacggctcggagttgttcgagatctcaccaatgactgagaccaggatgttgtcgaaagacgcctgagaatcgacattcaggacgcgcactttgcactcctggaacttcaaggagctaagcttctcgttgatggcctatgggagtggggtgcgtggttaggcgatattcacattgaggaatcgaatctaactcaccttagtaccaacggtgacgggaaccgactcagcctcagtgccgaagaccaactgagagcggcgagagtagaacaagtgaagcttgtcggggttgcggctcatggtggtgtagaactgctcgacgaagtaccagcccacctcatccttggagatctcgttcttctgctggtcggtgggagtgacggtagtcggggtggaggactgcgcaggctggaagctggcagcagtgttcatagtgacagatgcatggttgtaagattcagggtaaccgtgctgagcagggtagttaccattgataggaacctgagtcatatcggccatggcgttgaattgaggggttttatgttcggtttcgggtggaaaataagatcaaaagtaaccgagcgcggcgaaaatgaaggtcgagactacaacggccgaagtgcttcttttatgaagaagaaagcgatgaacgttctaaaaatggaattgtcgtgtttccctcgcttgactgcatgttcattaatttcaaggtcttgacttgggcatgggagatcgggactcacgatgcgaaataaacgcagcaccaatgcaagcaattgaagaggatagaaggaaatcacgtaaagaaccaaaaaaaagcgaggcgctttgagattgcggaaaagcgggaagtataggtgaagtgagaaagagttctcggttctgatggcgcggagagggagatgtggagggtttgagagaaagatgagaaagatcgagaaaatgtgggtctaggaagatgaacagtgaggcgtggagagtcaggtagaaaatggggaaacaaaaaacgagatggaatgaagctgtgggaatttgccttcgaagaaaagaacttccttcacttcgactccgtgcgggtttcgcgtggccttggcgggtggccaccgcccggcagaattcatagtacagctttagtgtacaaagatatattattagggatttctatccatatagatggggtcgaggaaagttttcatgatgactcaagatacgtgacagtcagacagggaaaataagagaaaacaaaatgccagatccgagagttgatactcaaatcatgcgcatctcatcaagtcaaaacgccacaaactgatccgaaaaaaaagaaagaggggtatgataggacatgaaagggtgactgtaaaaaagaaacagcaatcataagagccgcgtcgatagaggctcggatgttgggacgaggaaaaaaaaagaagcagagataaggaacaagacacaagcgaacgatcagagatggccaactatgcagcgtacacagcatatggcaagccttatgtctcctaatgtaccgtcaccatcagggctaatcagttcgcacctcagtcttctcggagagaggcttgcgcatgacagcgtcttggctagtcatcctccgacctagagcgcgctcgaccttagccccgagagcgagtttgttcaggttgtccgacttctcctccgtggggacaaatcgctgcttattgagaggcttgctctcgaggcgaccgaaaccgtcatggaggtgatagatgtcagcgattctggggtcgccgttgagggtagtgctgtcggaggcagccagcgaggggcttccactgacagtggagaatcgctttgagtttcggttctgcagcagattagacttgcggggttctcaataaataaagcaaaggccctacagcggacagaacatgtggaggggaagagaaggggattcctaccgattgggccatgatgggacgctcagagtcgagagagggttggcgggccatttctggggggaatgatacggttataaagaggaggatttgcgccgaaagaggggcgggatttcaaatggtaggtataggaaggcctgaaatggaatgcagactgcaggattgggctattagcgggtgtattattgcctagtggctgggcgatcttgaatttccaagggatacatactcaatccgggtactccgtcaaaggggatgtgttggaatcaggtgcagaagtaccaatgcagtgcaagagtagaaatagagtcacagaaaggagaagacggggtggagtcaaagtggttaagtggtggggaaagacaaaatgtgtggcggaaaaggggaagggattttatggaaagatcgacgtaatcgtaagatgtgcagtaaagagtctgcaatgaaactccaaggtggatatgtgattatacaaataagaaatgacctcgggattcaatctcccttctctgatgtcaattaaaagctttaccgggaatattttgccacgtgctggccacgcgagccgatcatttcggcgggtacggagtactcagtgatatacactttgtttctactccgtatgaagattagtattgtatattgtaatatgagggtatcaggataagatgagaatgaaagacttggattacttgcgagtttctatctcctataacatatgtcgtattggcagcaagaggcaacatcttggtctctatctctgtatatagtatgtaccattttacaaagacaaagagctggcaacacagagccccaacagagccccttttacaacaggtaaccataataccacatgcaaaacccaaaaaaatgatgaaacaagcccgtttaccctaacagtccaactatctagtcttggcaaactatgcagatcacgaagcaccaggatgctttgagagtctatagttcgagaagtcttgaaagaagtcttgaactactacattaacaagtaataaatgtcaaacctatcagaattgttacatgaagttgacgtgaaagcaacgaacacacttatactccatcacacaccgcacagattctgccggatttacttccaatttcaaggtgcaaagccatctctgtcgatcctcattcaattcaatcaacagcgtcccgcagaaatggccaagccaaaatcctttctcagggagacaaagtcgaagaagaagtctgcctcaaaacaggtatgcagtagcaatataccccgcacagaacagcttggtcatgatctcatacattttgatataggtacctgtgactgcagatgattttcttgcaggtgtgtgtctgaaccccaataagccaataatatcaatggtcaaaaattaactattctccagccggcgtcgagctagaagaagccggcgagaaatggcgggccggagatgcggccaagtctatgcgcttctttatgcgggccatcaccaactatgacgaaggactacaaaaacatcccggcacatttgatttagcttacaacaagtatgtaaacaagccattattttgaattttgcatttttcaaatctcatccatgattgaagagtattggtttgggtttacctttactaacacacgacctagagcacgagtccaatatgaaatcacccagcaccccaaattagcagcccagttgccagcaccacagggggagatcttgcagattgcactgcagtcacaccgggatgcgttggccctggagcaggacaatgctgacgtgttgttcaattcgggccaggtgctgaccagcttggcggagttaatatctaacctgaagcatcccgacgaggagcagcagatgcaggcaggcacctatttgcaagaggcaatcgagctgttccagcggtgtctaatggtacaggagatgaagtacacggaaatgcaagaggagatcgaaatgatggaatccggggatgtgccaccggagccggaggctgtaccaccggccgcgggacagtccaaagccgagtccgcaggtgaggagcaagaacagtgggcgatgattgtggagcccgtcacgaagaatacgctagtggacactgcggtggcgcagctggagactttgaccactctgtgcaacttgttgacttctaaccccagtgcgggcggtgttggttgggtgcaagagtactcgtcggagctggtgcagtcgcgactgcctgcttatgccgaaggttcggacagacagtacgaggcggccttggcgcgggccaagttcatctgtgccttgaacgatttgctctaccgaggcggacacaccgatatccaaacctaccagcaagaggtcggacaggtctttggtccagagctggatgtatcagcggaccctgatggactgtgtagcaaagcagatgcgctcacatcgttgaaccaggcactttcggatatccccccaccagaggatgacgagatgtttgagaacgcggtagcattgcgttggaagtcgctttcaaccgctttggacgcattaacggctgctaccaagctcccggatgccgacaacctgtccaagattcaccttggtcgcggagacgtcgagatgcacagatggcgtcttggtcgagcaccctggaaccacgccacggcgaagcagaacggagctatgctcctgcgcaacgcccagacgtactaccgcggagcaacagctctggctcgccgcgacggagcggccgaggaagaacgcgatggaacgtgtaaggaggcgattgctgcggcgattgaaggccagaatacgaaactcgagcagctcaagtcaacggacctccaacaggtgatagtcgtggcccaggatatggtggaagacggtatggtcgacggcagggaactgagtgccctgatttcatcatgaagcggacagagaaacaatttccgcaatatgctcacagacccgggtgggcttttgcctcctcgtccatctggatcgcatcctggcgaatgtgatgttgtctgctaaattgcgtggccgctgtagcagcaccctcaatatccgaaacaaccaatccaagatgcgacaatagccgctcaatttccagcctctgcgcctgcacagtctgcgcaagctccgcgttttccgcatgagtagcctcgagtctggcgttgagggtcgactgcgcttcttgcaaataaggcgtaaggtgcgccctgtacagatcttcagcgccgagtgtatgcgcgctgtgtagtaaataaaattagaagccagaacaaaaaaacaaaacaaacatagtccgaataaacggcaaaacgccccaatgcattcaacatacactgttctctcttgaccctcagcaattcccccctcctgctccctcctagctctcgcatccccaacaagccgatcaagctcatttaaatgcgacaccgcgtccctttccgcgacaatatcatcaaactcagccttcgcattcgcttccagcttcgcgttcagttgccgccagacaccctccaagctagcaggaacatggcgcgcaggtgtcggaaaacagcctgcaaagttcgcatatgaattggcacggagtgtacgcgctagagcctgctcgaagacttggtttagacgtgaggcgcgcgggcctggggattgggggattggagctggcgggggaggggatggcgacgccgcgggcggttggtgggaatttgattcgaccatggtgggtatctctgctttcggggtagagtcgaagagtgagaagtaatggagagcatgcgggtatggcgagggttggcgtgcagaaggccgtttctccaggaatttggatctggggtgttggactctgttcaacgcgacacgccggtcacgtgtttctatagattgaattggtggcttcgtacgttacagcgatagtatttggaaaactttaattttcatactctgtgaaatgctacatagtatgcgattatatcaattctataaagtagtgcagcagatggtatacttggaagaaaattcagctaccgaccaactcctagccctaacttaatggatctaggcccaaccaactccggcgtctgttctcctcattctcggctttcaccaaaagagcaggactcgggctttgagagtctttccgtagattgaaagattgtatattcgtcgccgaacgggatatgcgccacgagcatacgcgtctatagaggtcagaccaaagtaatttgaatgcgggccatgagatagagacgtatataaggctgttccaaaatccctggaggggaaggacaaagctagatgcatagttcagactaaaattaaagttgttaggacgagccagggaatagactctgtttatcgttgaggggacctgcagtgtcgaacaatcaacacaaagaaccgacagcagtttttagattataatgggcttcaattagacctacccatgtaacaagcaatgcaatgaagaacagcatagcgtattttgtatatgcccacgttgctgaactagcttctgtggacgtcgacctccgctgtgagtctgccccatccggccgcccagtcttgccaaaattctcctgctgaagagggctggaatcggtttttgagctggacttttgaagcgtgttggctgtactaccgccctcgatcgtgaccgagtatgctctgaacgcattagacggcaacccgctcgcgtcgccctccgacaaggaccggcgctctggagtgaaacaggcaatctccctggtaacttgaatgccagtcaacatagcaaagggagattctgggacaagatctgagtcaatgccgccgaggttccgaagctggcgccgtttctggtaaatcaccgtccctgctcgtaaatagatggcgaaggtcaatgagataatgagccagactggtccgtagaagatagcgatgcggaggaaggaccactgtacagagatccagcaccagagctgtcggtggatgattggattagcatagggtgatagaagggaggactttggggttctgctcacgagggcggagccatatattcggccccgagcttgggtctggatgaagaagtatgcgaaagctgggacgaatggaacaccgtaacagcagagcacatatttccattcgagccgacgtagttgctccgagtcgtatttgtggaagaatgttaggtaaacattgcatgccattgcaaaagtccatagtgcatcggcgggcatgaacctatgcatccttgcttattagtggccatctgctaatggtgttagttccgatttgatacgaaccattgaatcaaaaacccttgaaactggcacagggaactatcaaccccagaatgaatcccgtctgccgatatgatggtggctatattagccatcatgttaccccatgatgcatagaacaccaagcggttgatgggtttacggaatgtgggggaccaaataaaagtagcgactataacgaaagtgccaacaagggagacagtcgagcaaacacgctctgtagccgagatggctaatatttgttgttctgacagcgtcatggtacatggtctatgacctagtcgtcgcgaaaaggggagggcgtccagctcctgaaggttatagattatatccactgcagatatgaaccgagaagatccccgtggttcaacaaagccaagttagcttgtgacaaatcgaggatgcagatgaccgtagacttaccagcgggggacttattttcgggttggggttaacccttgaaatagaaggcaaacggttcgagtaaatatgcccagagcacaataccacctgcttattatccgcaacgggcaacaaaggaaaaaggcaaatgacaaatgaggcaagaccaggccaatcaggatatttctggttatttctttcggcttatagctaggaagatgaccttgtgccgagtcatgcaacaaaggacgcagtcccaacagtattaggttcgaacaactgccaagaaacggagtaagaaccaagcaggacatcttttaaatgttttcctcatttcaaataccgcatgggccagggctcaagccggtactcctagggaaggacatgcgaacgattccagtgtgatggtaccacaacgtgcaatctcccagaattcacggaatagataggagattggacaagggatgagtgctggtctgcatagaaaagcctcggaggcatagcccttggggttgcaccaatgattagagtcattgtttaggcgtgcagcctttgtccccgccgctattggggttcgacagtgcttgaaggggtgaagttacctgaatatgtcaagggttacagcggggacgatatttgaggggccttgtgagatcctagagtcagttcgcccatgtgtgacactagcacaactgtttccccccgacgttctcacagctcattagtcgttgtagaagaccagattgaaagacgggtgactgcatgtttgaaagatttttgcgaacaagcaagcataaaggaattcaaacgccaacggaatgcctgaaagggttgctcttaagtacttatggttgggtacttggaataaggcgcagtacagcagctatgagctcgctcgtcccgaaaatccttggccggtggacaaagaaccagttgcagcaacatgacaagatattcccgaggattgcagttccagcggggaaatttgaactaggcccaagtgcttgttgcacacatctcgctgtgtgtgttaataaatacagattggggtggatgacagaatgcatttctcgaggaatagctattgctatttagaagacgacaggcagaaggctgacaaaatctggagcgctgctccagaacattatcaagacaacagacagtgccccgaagtcaattcatctccaattaggccatatactcctcatctttgacaaaactggcccaaaatccgcaatatcaagttgtttttttttaaaaaaaaaagaaaaaaagagacgcaaaaatatccatcatcgggtataacgccgaattctcccatgtccaattgtccaatcgagctcgtcatctcgtcatgcgcaggctagaccgctaataagcgggctgcggggggatcatgcctccatatccagccatctgctgttgctggtgttgctgctgcaatttagcctggatctgaggcaaatcatggaaccacgggtgctgcagagcctcgttggcgctgatgcgcatctccggacggagttggagcatacggtttaacagatccatcccgatagcatccatttgagggatgatcagcgaaagatcctgcgtggcgtagatttggaaatcggacttgtattctggcaactgcgagatgccgggccatgtccgctcggatggtgtacccatcagacggaagatcttgaccaattgatcctcgttagttgtgccggggaaaagcggacggcccgtgtacatctctgccatgatgcagccagcggaccagatgtcaatgctggtgttgtaggtgcgacttccgaggaggacgtccggtgcgcggtaccacagagtgactacttcgttggagaaggtattgaccgggatgccgaatgcgcgggcaagtccaaagtcacccagcttgagctgacccttcttgttgattaggaggttctgtggcttcagatcgcggtggaggactcggttgtcatgacagaaagcgatgcccttgagtagttggtgcatgaaagatttgactgtggcaggatccagctgtccacgatcaccgcgagtgtccatatatctcttcaaatctctgtccataaactcaaaaacaagcataagtttgttttccgtgtggatgacatcgtatagcgagacaatactctcatgcttcagctccttcatgagtgagatctcacggattgcagtcgacggtgttccctcctccgaatccaagtggatttccttcagcgctaccatttcaccggtttggcgattgcgccctttaaagacctgtagtattctgcatcagcggtgagcgggggagaggcgatcatgctaggagccgggggagatgaggggagagagatcgagagagattgagacgtacggtagcatatgtgccttcaccgagctaaagataagacgaatactcgttagtgaagattccagacccgataatgaggggaaaggcataccttttccagctgctggaaggagctgggctgctgagtcttgtccattttttgtggaactttggaagccggtggccccgatggtttgggtttagaatgaaagagaaagtgaccaggggataccagatttgaggcgatctttaaagggtgggcaggatccctgaagtgctccatgctgagacgtgagggaggagccccgcgctgagtggcccgggacttgtcatagttggcccttttcttttggcctgagttggcaggcgcttattatttctacactgattttggtttctattgttgctataactggtacattgtttataatttgtttttagaatgtcctcttgttattttctaaatctataaattggctggaagttgggatacaacggtcggaaggactgactggcatggatggctacaccggacatgaggagtaggttcatgcccaagatttccaaaaagcagggcttcgttcctcacgccaccaacattgacaataccaatcggcatgcctcgtttgtgtgctcgttccactaggcgccacgccgagaaagtcgccaggctgctacctaggatgagtagccgcccagcatcgtcgatcgcttcttcagccgctgtcttcaccagtggatcgatattttcaccaaacatgatcactgccggtttcaaaatgccggcgtttgaagtcgccgataatgccccgtcactctctacctctacaatcgcctttgtgccatcgcgcagcgtgggaggattctccaagcatgtcggacatggaggataacggaaggtagaatatggcgcttcagcgaggtcaacgtcgccatccgggttgagcttcaagcctttccgccgttgctcttccggattatcggtatcgagcgcaccctctgcaaccatacgagccaaaaactccgcccaagctggattaagtttctccagcgacgcttgaaagtcggcgcggggaagttggttttgacagcttacgcagacgaccgatcgcaagtatccgtgtagttcgagggtagacagttcgggatgcgcgagggaatgaaacgagtcgacattctgcgttacaacggaactgatgtaccctttttcaccgagacctttaattgcccaatgagtcgaattcggctttgctttcagaagcccgggccagccaacgaagctgcgcgcccaataccgcttgcgtgactcatggtgggagatgaactcgtggtagtaaatcggacggtaagatttgtttcgccggtaggtaccttggtcgcctcgataatctgacagaccagacgcgacggagatacctgcaccagtcagcagtactgtctgggaatgtctccccacatcgacgccgcggagatttaaggacggtggcgcagtgaagaaagtgttgatagcatcaattgcccctgcaagtgtcgttgcagcccgaggtgttataatagcaggcggcaatggtcccgtgaaagggatccgaatagcaggcgtcgtcattgaagaccatcatatgttcaccgatgtcttggcggaacggggagtggaggttctccaacaatggcgtagttgcttggcggacacgaaggtattgtcaaagattaaattaaagtaatctgaaggataaataaggaatctgataggctccgggttggtagtccggtttgaggggatcaataggagtcatggagatggtcatggggagaaatgcaaacgtgcagattggattggaaacggaaaattccagggaatagccggatgacatgaacatcccacttacacctgggcaaactcatctttcaggcggattagatgtaacttgtacggaaatccctgtctttactacataaagacccctgaaaagaacactctgtccaatcctttgtgctcgcgtgccttcgacgcgatgccactgacgcagcccctatgcaggctcaggcttcgccctctccacttaaggatctccagtctcacatcacttactgcccagcggcgtatacttacatccactccttttttaaaagacgcttcttcctttatttttcactccagacctcgttccatcccacgagcggcaacacctctcgctatgacacaaactagggatcatggccatagccacggccccggtcaccaccacgacaatacctacctcacttccacaaacaaacgcgacgctggtgttcgcatcacacggattggtctcgttgctaatctgtgcatggccattggaaaattcgttggtggctatgtctttcactctcaatccctcatcgccgacgcataccacgcgctcaccgatcttgtctccgactttttgacgctgggaactgtcgcctggtctctgaagcccccgagcgaacgattccccaatggatatggaaaaatcgagagcatcggtgcgctaggagttagtgggctcctgctctgtggaggagtgttcatgggtctcaacgcgggacaggtcctactagctcatttctaccccgaggtggctgaaacagtagctcactccgggattttgggacatggtcattcgcacagtcatgggccaatcggtcctagcatccacgcagcgtggatcgcaggaggttcgattgtggtcaaggagtggctttaccgtgctagtaagtaaagcgatatagggtgtatgagtgtttgttatccatcaggtgactaactttattccagccatgaaggttgccaaagagcgcaagtcctccgtgcttgcatctaacgccgttcaccaccgcgtcgactccctaacgagtatcgtcgcccttgtcacaatcggaggaagctatgtcttccaagacgccacctggctggatccagttggcggggtcctgatctccttgatggtcatcaaagccggttggggcaacacatgtacctcccttttagagttggcggatactacggttgatgaggaagtccgacactccgtggaggatgctgcctccttggcattgaaggatatccaggatggacacgaggtgatcgttcgggatgtgcagggcctgaaatccggccaaaactacctaatggacattgagttggctgtgccgggggcctggcctattagtcggtcacaacacattgaagaggtcgttcgccacgccgttggatctggagttcgtggcgtgaagcgcatcaaggtccgctttattcctgcggaacatcaggacctcacgttctcggatgagtttgttgcacaagatgttagtggtgatccagagacactccaagatacccggaagcggcaatagggatgtaattctgcaatgatacccttggatgcgggatctatgtctataaatcgaatatagaacaagttcataatactaaacagagtacggagtacaaagtaagtatattgtactacagagtataaagtgtatagtatagtggggtaattctattctaccgagaatttagcagagcaacagctcaaaagagctatttacccggcaaaacctgctcgggctggacttgacattcctggagaatccatcaatctgacctaattggccctcggtgctcacttgccactttccaattgtccgctgtaccctgtggttatcgaagacataagaggatgcataaagtccaccgggaccggttatagtccttttacatcatcggtccatcccacctacacttcttttcccggactcaccccttgatcattgaattacattacatatcttcgcctaaatctggaagaatctcactttatctttcctgtcactctatcgcctggtattgtatctcttcggtcatggcgtccgatggccccctctacattggattcgatctctcaacgcagcaattgaaaggattagttgtcaactccgatcttaaagtggtctgcattgccaaattcgacttcgatgccgactcgcatgggttcccgatcaaaaaaggcgttctgaccaatgaagccgaacatgaggtgtttgccccggtcgctttgtggctgcaggcgttggacggtgtactagaaagtctgcgcaagcaggggctcgatttccgccgtgtgcaaggaattagtggtgcaggacagcagcacggaagtgtatactggggtcataatgcggagtcgcttctccgcaatctagattctagcaagtccctggagacacagctggaaggcgctttctcccacccatacagtcccaattggcaagactcgagcacccagaaagaatgtgatgagtttgatgcagctctcggcaagcccgaagatttggcgcaagccaccggaagcaaagcgcaccatgtaagagaagcatcacagtcttaagtataggcggggcaagcgtgctgacactgtcgtcagagattcacaggtcctcaaatcctccggttcacacggaaataccccgagatttatgagaagacctcgagaatctcattggtgtcatctttcttggcatcccttttcctcggccatgtcgccccattcgatatctccgacgtgtgcgggatgaacttgtggaacattcagaaaggggagtacgacgagcgcctgattcagctgtgctctggtgtttttggaggcgaggatctcaagaagaagctcggcgaggtaccggaagatggaggcctgcacctgggcccggtccatccatatttcgtggagcgtttcggctttagtcccgattgtacggttattccagcaactggtgataacccggcgaccatccttgcgctgccactactgccatcagatgcaatggtttcgctcggcacgtctactaccttcctcatgtccacccccagctacaaaccggatccggccacccacttcttcaaccaccctactacacctggcttgtacatgttcatgctgtgctataagaacggtggcctggcccgtgagcacgtccgggacgcaatcaatgaaagcctgaaggatacccctgcccaaccctgggccaactttgacaaggttgcgctgcagactcccccattgggccaacggagcccatcgggcctgatgaagatgggcctgttcttcccgcgacacgagattgtcccgaacatccgtaagggccaatggcgttttacatacgatgccaacaccggaattctacaagagacgaccgatggatggaactcaccgcaggacgaagcccgcgccatcgtcgagagccagtttctttcactgcgcttgcggtctcgagaccttacccagagcccaggaggtggaattccctcacagccacgccgagtttatctcgttggtggaggatctaagaataaggcaattgccaaaattgctggcgagattctcggcggtgttgagggtgtatactcgcttgatgtcagcgacaatgcctgcgccctgggtgccgcatacaaggctgtttggggtatcgagcgagagcccggccaaacatttgagagcctgatcgggcagcgatggaacgaggatgatttcattgagaaaattgcggatgggtatcaaaaggggttgtttgaacagtacggcctggccgtcgagggctttgcgcagatggaaaagcaggttttgcagcaagaggctgacaaggccaatgcagctgcaaattgaaactactatagacataaaaaaatgggagtataatttatttagcatcagtttagctattttcaagcctcatatagcaagggaaatagtacatatagtacgatgttttaacaacaaagctcccgcccaaaaacaacttcgtgcaagccccttgccctatttagaaaaacgccaagaacatcacatttgaatcaaaatctccatatctctactcgaaatacgttggacattggatttgaagacctgccactctcttggcaagcgaaggcggaacttggtgcacgggaccgattacgacatccagtttgaatgtctgcaggtgatatctcctccaccgaaaacaattttaaaacaacacacacctcccctacgttttgatttccctctctccttcccacaccttgaagggagactggaagatggaagaacaggtgagtctcccaattttgttgagcaccctcaaaaaccaaaaaaaattccaataccccaacaccgcccctcccccgccgtttcaaacaacctctccgatacctttccctcaactcaagacacaagatcattgacacatcctaggtagcaaatgcaattgagatcgcctggaatccatcctccgacccagccctaaagtcgcaagcttacgaataccttaaccaactccgctctgacccctccggatggcaggtttgcctctccctcttcaccaaaaccccacaacagcccgaagtcgtacggcatgtcagtctggagattgtcaatagtgctgcccaggtcggtttgatcgatccggcctcgctcggtgtcgttcgagatagtgtgctagcctacattcgccaggtctacggcccggaggccactgccacccccgatcctccttacatccagaataaaattgcacagaccgttactttcctcttctcctccctctatgcgaacggctgggagacttgtattgacgatctactgagcctgaccaacaaatccgcgggccgggataaccaaatcggcgttgttttttacctgcgtgtgctgagttcaattcacgaggagattggcgatgtgctggtttctagatcccgcggggaacaggataaggcgaatgcgctgaaggacctgatccgtgagcgggacatgcagaaaattgccaactcctggcaggagattttggcggtctggcgggaaggtgatgatgtgattgtcgagatgtgcttgaaggcggttggtagttgggttagctggatcgatattggtcttgtcgtgaaccagaccatgttagacctgctgttccagcagcttggacgggccgagaaacaggagcttcgggagggagaacagcgggtgcgtgatgcggccgtggatgtcttcaccgaaatcattggcaagaagatgaaaccttcagacaaaattgagatgatcgctttcttgaacctcgactccatcatcacgcagctgtctaacagctctccactacgggagagccgattcacatccaagtacgatactgatttggcggagacggttgccaagcttgtcaacaacacagtcgtggatattgtgcgggtattggataatgatgctggtcccgtcaaggagcaggcagaaaaccttctgcaggtcttcctgcctcacattctgcgattcttctcagacgagtacgacgaagtctgttcgactgttattccttgcgtcaacgatatgctcacctacgtccggaaactcgcaaaggcgaacccatccttcgaacagcgaaacaagtccatcctgcttccgattttgaaggcaatcattgcaaaaatgcggtacgacgagacctcaaactggggcgaggaggacgagcagacagatgaggcagagttccaagacctgcgcaaaagactaggtgtcttgcagcaaatcatcgcatcggctgatgagcagcttttcatcgatgcgatctcagaggtggtaggaacaactttccaaaaactgcgggcatccggtgggcagctcgattggcgtgacctagatctcgctttgcacgagatgttcctgtttggcgatctggccgtcagaggtggcagtctctacctgaagggcgcgcctactaacatggctgcgaaccgtctcatcgagatgatgcttgcgatggtagagtccgatatccgatcattcacccacccggcgacccaacttcaatacatggagatatgtgttcgttatagctcgttcttcactcaccatactcatctcatccccggagttctggagagcttcctccagcttgtgcaccaccctgttcgaaaagtcaagactcgttcatggtatctcttccagcggttagctagacagctgcgcagccaaattggcaacgtagcacaaactgttgtggaggcattgagtgacttgttggttatccaggccgaggtgccttcagagggcgatgacgctgatgagatgtcttccgaggaccacgagggctccgcggacgccgtgttcaacagtcagctgtaccttttcgagtcagttggaataatttcctcgaccccaagtgttagcgcagataagcaggttctctacgcccagtcggtaatgaaccctgtctttaacgatatggaacgtaacctcgaagcggccaaggccaatgacgaacgtgcattgctgcagattcaccacgatatcatggccctaggaaccctcgcccgtggttactcggattggcagccgggcaccagctcacccgcagctctgcccgtgcctgaggtctcggcggctttcgcccaggttgctgaagcgaccttggttgcacttgagtctctcagttcttcattcaatatccgaactgctgctcgctttgcgttctcgcggctcattggtgttctgggcgcgcagattctccctcaactgccccgatggatcgatggactcttgactcagacttcgtcacgagacgagatggccctgttcctccgccttttagatcaggtcatctttggattcaagggtgagatatatagtatcctcgacacgctcctgactcccttcttgcagagagtcttctctggcattgccgatccgacaaccggcactgatgacgagatccaacttgccgagttgaagcgagagtacctgaacttcttgctggctgtactaaacaatgatttgggaactgtaatcattagcgaaaggaaccagcccatcttcgagaccgtcatcaccaccatcgaacacttcgctaaagatatcgacgacttcacaaccgccaagatggcgttctctgtcttgggccgtatggcaagctgctggggtggacctgatattgcccctgcccctgccaatggcaccgcacctgcccaagccgcactccccggctttggtggattcatgatcacccggttctcgcctttgtgttgggcactgcccacgacaccatccttcaactccaaagatgcacaagctaagcaggtccttgccgaggccggcgctttgcaacgcactatctactccaagacaggcatggaatatgcggaatacttgcgcagccaggaattgcccggcatgggcatgggggccgacctcatcgaagagttcctgaccgctatgaaccagctggacgtgaaagggttccggcaattcttcccggtatgtgctaatgccttaatacttccaacgctttcgatctacgtggcatccaactaattcatatgcaattgccaacagtcattcatccaacgattgagcgcatgaagtttcctttcctcctctctatctgctttctagattcccccatccattttccatatttacgttctgacgcgacgaggtgacgtctgtcctcatgtcgccctgtgacttcaatcttctataccatctacatcatcccacccaagcatcccgatcccgataccttacttgcccaacttgaaccccaagaatagtgctggatcaaactctcgggggcaaatcagaaagaacaaaagaatttacctgattttcaaaagttccgagtatatagcttgcttcttgcttttcattgatctcttttgctcatggtgcattcgcattgtggtgttcatttgtatcccccgacaaccacttcacggcgtatcctttttatctgccccccctctctcttgtcggctttataggataagaccgaaaggggcttattttttctcgtgtcttgtgttgaatcactttcaactttaatggtgtgaactggagtaggtagatcatgaaatgaagtggtagagttgcctcaataagctcaacagagtattgactacaagaagcttagaatggattgctacgtacaatatagtaacctgatctgtttccaaccttggagaagacaagtcaccattcggtcatctccactacaatcctgctactccccacgatgtaacccttctttcggttctacctactagcctggaggccaaaaagtatgatatgctcagaaaatgtgctgcctattaagaaatgtaactctaggataagccacaatatgaacggatggcgatctagggccagtctcttgttatacaaggcagacatatctaggaggctagtagctctatgctgtatctgagatgcaggatctgagggattctccgctaaacgtcaatcaccttccgatttatgatgtactccacactccgtacaagcatctgcattgggagcagaatttgattctggactggcttttgtattagtatagtgcacatgactatatttgtggtttaccacatcaaaacttgaatacctgagactaaagaagtgcaggtggagtcggcattaatcttgcatccttgtatgaagaattctttagggttagcgattggacaaccccaattgtttggtataattagagattgactaaagttctcgacagatgggacgatcgaagagatagatttgtaaatctagagctacctataacgtaatatagagtagaaaatcgcttgagaagttgcatagttatccattccatgcatgccctatcccaagcccaatatctcatgcagctagcaaaaatccctcaaaaacagcttgtaagttggtaaactaatttatatccctgtctagacccactgggggccatttttctcatctgttattcgcctctccttcatctcgagagatctaaacctccaaaccatcagtgtaaaaacgacagacttccggtttcccctccagaaatatttaagcaatgcctactttggttaatcgcatattcgaaatagctcgcttctgttgcctatctggtctcattattttcaacggcctctactgctatgttgtttccgaagagtgtgctgatcacggcactttgctatctttcaacttcatcgctggcctctaccttgccttcatctatccaagggcagccagttccagacaagtggttccaaatctcgctcaatgagagcacttctgggaataccagccccagtacaaggaacatcgacaatgctcttgtggaacgaactcccatccaggtctgcgagcgtatcattaccgcgaccgctgcctgcactgtgatcgcaggttatgtgatttcatttgcaaatcgatgggagccacaatcaaggagctctccaatcagggcaactgcaatctcatgcgtggcagctatcagaacctcagatggacataccaatcttccggccgaaactgcgatactacagcacagcaggcaaccatttctggcgccatcaagaaatacatgaccaacgtggaacacaacaaaatctgcggcacttgcctttcttccttatgtttcttccatagaacttctgtcatgtttgagctatggaaaatgctgtgatgcttaggcctcatgtgatagtattccctgcaagcttcccgatatttgtctctagttatacatccctggttatatattgaaaatccggctgcacattctaagccttttcccgctttgtttcgccatctagttatgaaaccgagaaaggagagaaaatgccaagagacatcaaagaccaccaaaaagacacgataaagccacttatgccgccgactacccttgtagtttccacaagatagaaggtttcttcctctttcaagtgccctatagctatcgggaacactccgtacaatcactcgtgttcttgggtgtatgtaccttattaatcattgggataaaaatagcatcagttatcgtgctagtggttgtgtcaaaaactgtctaaatcttctttagccttccaacattcacatccatcaaagtcttcgaatacattgacgtttcatggctcagaattgcttgaccggcgcttgcctctgcaagaacatagcataccgtattacgttgcccgcgtcagaatcaccccctaaggtatagtttatctccaacttgcccaatcagcaaatcccattcgcttactgacaatctcgccaggtgatcatctgtcactacaccaattgcaaacgctatacgggctccagcttctctgccaatatcatcgtgccacaatctagtttgcagcacatcaaggggtcacccaagttgtattcggatcgtagcaacaaggacacgcaggtattgcgcgagctctgccctgattgcggtacgccattcacatcacgatcaagcgatgatcaagaagtcattgcggtgaagtcgaggacactcgatgaagaacaccgacttaactgtgcgaagttggcaatggaaatctactaccatcgaaaggataaatgggtggacgagatccctcctgcttctgccctaacagcgagttcaccagcgaagtcagttcctgcatccaagcctagtgtgcctccaagtccgatccaatccgccctctcctacttcaccggctatcagcgagcttctgagggttggctcgagaaagtcaatcgcgccttccttatatcgaccaggtcgcactttccattgtaagtaagcccaggtaaataaaagtagcatcgaacactcatgtaaactcttcttctttttgatctccgtcagaatttatctcaatctttacgacatgtcttttcccagaatttataatttctttgcgcagaaatgtgtgccggtgaccggcaatctctcagcgattgtcggtagtgccatcgccgttgcaacgtggagggctaagctcgcagaagaccgagctaaagccaaagagacagacaatccccctccacacggagtgaagtaatcttgctcgtcaagattaccgggcgcttgctggatgggcaactccagcgtgtgcttgctattgaagacggttgcagtgtccattggacctgtctccgacggatatagctcctccctcggcttaatgacataggggctggattctagagctctgtctctacagactgacagtgggtttgttcacgcagctccactggcagtctggatcgagtgcttgcacatacttcgttgtcctgcgccccttttttttatatatatctatagcccctcttgctgaccgagggtgcatttattaaagaaaacaaaaaaaggtccacgcggttgggtggttaggttgggcctgggacaatcttgctttcattttcgctgtgagtacttccaaatggatgccctgttgctgctgactgacagtgggttggttgagcattgctcgcatttcttgtgacagtctgggacacgaaggtggaagaacccgaagtgtcggtgtttcactgggcaggtggtctcggtcccgtaagtcataacggtggtagtggcaccctcaggagtggtgggtgtggagttggcgccaacgcttgatcagacggcactggtgacagcgggccccataggagcagttgtggcagcgaccagagggagccggggtgcttccagcagcgatagagctgaaaatgtttgaagtggaggtcagggtaacagttgaaaccgtgctggatgtacgtcggatcggtactgtgagtgctgttggagtagggaaggcactataggtaactataacttcgaagttttctacggcaaaggaaataaaactctagttagcatgtcaattgactgatgatgtgagcatttttgttatggtacacatttgggacctaccagctccaaaggtgactggtcccgagaaaaaagaaagaaaaaacacgcctgcatcaagggaaataaggaacgaaaaaggaacagtatcaaccccggtttaccaggcctcggtgtcgaagttctcaacgccgaagtatgaggcaacaactgtacggtcagagaacttgcgacccgccagcgctttgagagcggtggtggcggattcagcggtatcgtacttaatgaagattttaccagcgccgtgtccacggcgggggggcttcatcccccgaaacttttccnnnnnnnnnnnnnnnnnnnnnnnnnnnnnnnnnnnnnnnnnnnnnnnnnnnnnnnnnnnnnnnnnnnnnnnnnnnnnnnnnnnnnnnnnnnnnnnnnnnnnnnnnnnnnnnnnnnnnnnnnnnnnnnnnnnnnnnnnnnnnnnnnnnnnnnnnnnnnnnnnnnnnnnnnnnnnnnnnnnnnnnnnnnnnnnnnnnnnnnnnnnnnnnnnnnnnnnnnnnnnnnnnnnnnnnnnnnnnnnnnnnnnnnnnnnnnnnnnnnnnnnnnnnnnnnnnnnnnnnnnnnnnnnnnnnnnnnnnnnnnnnnnnnnnnnnnnnnnnnnnnnnnnnnnnnnnnnnnnnnnnnnnnnnnnnnnnnnnnnnnnnnnnnnnnnnnaatgaagattttaccagcgccgtgtccacggcgggggatcttcatcccgagaatctttccgaacttggcgcattcctcgctcacatcctccatgatttcttcgtaatcttcgtcattgaggagctcgtcaagcgtgaccatgttgagaagctgcaggacctgggtggtctctagatcctgggaggtcgtcttggcgaacatctgcatggcattcacgcccatgtcgaggccagaggcttgtgtggttccaacgctggcgagagcaaacttaaggtggtgatcgactagttccatgccgttcaaaccttcaacggcaagcgcagtgttgttcgggtcgacgtattcataaaaggcaattccctggaaaagttagaaagaatttgacggtagggaaatactcaacttacccgagactcctctgtagcagcatccttgaccaagacaaatgacttaaggtcgccgaatgacttgagcaacatgataatagcttcctcgttgatgtaggttggaatattagagatgcagatcttgttgggtgagtcaggcacctcgctcagaacgacgtccggctgtactggctgcgatgcgctcccgtcgggaacaatgtagtcctttggccgtcgcacttcaagtcccttgtctccactctccgccatggtaattccatcgaaagccaatgcgactgtggcgtcatttggatccttgaactccaggagcgcgaatgttttatcttcagaaacttgggcagagatgcagggatcgacattgtgaataacattgagtccattcaattgaagattgaagaaggtaataacggcatcgcccgagacaccggacgggatgttgtaaacgaaaagacgctttgattgacgagagttagaaggcttgagggcagcattgtcgctatcgccagtgggagggttcaggaagtccttcatgcggctggggtccatcggctgctgacgaggagctccgggaagagggaacatccctgttgatgttagacggttccactagctcataagctttaaacacatacctgagatctttgcctgttcagccgtaacattctcataaccaggaggcttcatgtcccattgagtcaaacgacgtttacgggtcaacaccgagggcacatctgtcaaatcgggggtaggctccttgcgccgcgggggcgtggcgcttcgcttgcggtctcttctctcacggtctccacggtcaccacggtcaccgccaccacgtccaccgcgtcggtcgtcaaacaagtcgcgacggggtctttcgtcaaagtcacgtcgacgaccaccaccgcgatctccaccaccacggtcaccacccccacgatcaccaccaccacggtcaccacccccacgctcagcgcggtcacctcgctcggcacggtcgccacggtcccactctcgatcatcacggcggccagagtagcggtcttcgcgctcacgggcacggtagtcacggctggttgagtacgagttcacttcgcgctcccgacgagatccatgatgaggcgaacgcgaacggcgtcgttcaccgcgatcactcctatcgccccgttcagctccacgctcggttcctcgttcggcaccacgctcagcacctcggtcggcaggtcgctcagctccgcgttcgggtctgtcaccccggtctcgatcacgccgctcgtcgcgctagaattggggttaatcgccgcggttgcgaccaaagattggctgatacttacgaagtagtcgcgggaacgtccagtctcttggggatattagcagttataccagaagttaatgtaaggatacttacctctggatgagtaggtgtcaccgttcatgttgaggttggttgaggaaataaatgaacctgtcgccagtgaaggggaaaactcatgacccagagctgcaggcggtgatggcctcaccgcccgtgtgtcgattcggattccggcagaaaatacaaacatggagacagcgactccgccgtctcgaatcagtaatttggatttcaaacatgtctctaggtgttttgtcagaatggcagaagctgcctttgagcttgagtgagctttgcatcaatactacgctcagatgcggccagtcttttaggtttgtcagccaagtttccgggtccggggattgtagatcaagcgactgaccctttttagatggcggaactttccagagagtcaggaatggcgatgcgttctctatggccatcttctgtcgctgaagcaagactcaaacttcttgtactatagatctgtgcaacctccttcccatgcattcaccgacaatgatcatctcatccgcattatcaaacattacttcaacctaacgccaaatttgactgaactctactctcaatggtcatcacaagaccccaatttcaagaagaaggctgcgcaattcaccgggatcaggatccttcgacaagatgcatgggaagcattggtatcatttatctgcagcagcaacaataatattgcacggatctcacaaatggtggagaagttatgcatacattatggaaagcccgtggccacaattgaagggcgtgcatatcatgattttcctcccccaggcgcattgactggcaaggatgtggaaagcaatctgcgcaatttaggatttggataccgggctaaatacatataccaaactgcggttatggtatccaaccgagagcagggctggctagatagcttgagcaaccccgagtgtccagcatttggcgtggatcctaaaccaagcggcgaaatgaaaccagaagggcgagagggatatcgtgaagctcatgaaaagcttcttgagctacagggagttgggccaaaagtgtcagactgtgtcagtttgatgggattaggctggggagagtccgtgccggttgatactcatggtgagttcttttgataatgtttctgatttatctctaatcctttacgatagtgtggcaaatcgcacagcgagattaccgttttggaaaaagctccaataagaacttgaacaagacgacttatgatgctgttgccaatcatttccgcaagctttggggtaaggaagctggatgggcccatagtgtgcttttcactgcggacctgcggacctttgcagacaaacttgctgcaactaagaaagttgaggtgaaggtgaaagacgaagagtctgatgtcaaggttgagacaaaagtgacaactgctctctctttgaaggtttctaaggaggaaaacgtcgatgtgaaagtcaaggtcgaagacatagatgatgccaagaagcccagggacaagaagagaaaggagactgagaacattattcctgttgttcaaacaacagagacacggagaatgtccaagagactaaagcgttgaagccactaaagacaagcaaaggactattcttgactactacttttaccgcagaaaatatctatacatcttaataatgaatatgccagacgcaaaaatgtacgacgagacacgagtctagtgcaattaacatgggtatttgtattcaataatcttagctatatcaatgatcaatgcctacaaccgtagttagtataacggtcgaacaactcttaacacaagtcttgaagttggaagaggtagatcagaagtccaggtagatcatcgagctagcatccgaaaacactagctctgacataagaggtaccagaaaataaagtataacaaatgcgttgtatcatcatgtgggaatattggagattgagcaagaagaggttgaactgacctgatataagagtggcgagaggcgtgtcgagtgtatatcgtacagctcgcactcaagttgaaccagaaaccattaattccagtcgactcaagtgcagaactgggtttgtcggttgttggtgttcgaacaaaatcggaagagaaatgaagtgaggttttgtcgaagaaaagaaataagcgaagtctatcacgtgaccccacacaggccccatctttcccgcccactctcactctcacacttctcgattttcgatctttcatccacgccgacaaccgaccagatttcctccgccggacacatcaccaatccaaaatgggtcgtcttcacagcaagggcaagggcattgcctcctccgccatcccctactcccgcacccccccggcgtggctcaagaccacccccgaccaggttgtcgaccacatctgcaagctggctaagaagggtgccaccccttcccagatcggtgttgtcctccgtgactcccacggcattgcccaggtcaagattgttactggtatgaaaactcagaaaaacgcgactctaggaattggaggattgaagatttctaacattttcgcgcaggtaacaagatcctccgtatcttgaagtccagcggtacgactccctccgcccgcatatttacatctgtcgggtgaagagagcgaacaatttgtgtggataaactttctggttcggtgaaagaacccgttggttttgaagcgcaaaatgctcgtctctctccccgagactggtcgcagaaatgcaccagcaattaagcctctgcttggtcaagaacatctagactgacagagagattttggaatacaggcctcgctcccgaactccccgaggacctttacttcctgatcaagaaggtaaaaagaattactccttccccccccccccccccccccctctnnnnnnnnnnnnnnnnnnnnnnnnnnnnnnnnnnnnnnnnnnnnnnnnnnnnnnnnnnnnnnnnnnnnnnnnnnnnnnnnnnnnnnnnnnnnnnnnnnnnnnnnnnnnnnnnnnnnnnnnnnnnnnnnnnnnnnnnnnnnnnnnnnnnnnnnnnnnnnnnnnnnnnnnnnnnnnnnnnnnnnnnnnnnnnnnnnnnnnnnnnnnnnnnnnnnnnnnnnnnnnnnnnnnnnnnnnnnnnnnnnnnnnnnnnnnnnnnnnnnnnnnnnnnnnnnnnnnnnnnnnnnnnnnnnnnnnnnnnnnnnnnnnnnnnnnnnnnnnnnnnnnnnnnnnnnnnnnnnnnnnnnnnnnnnnnnnnnnnnnaaaaaggaaaaaaaaatactccccccccccccccccccctccttttatccatgtagattatgctaaccttgattatctaggccgtcgctgtccgcaagcaccttgaccgtaaccgcaaggacaaggactccaagttccgcctgattttgatcgagtcccgcatccaccgtctgtctcgttactacaagaccgtcggtgtcctgccccccacctggcgctacgagagcgccactgcctccacccttgtcgcataagcgcattttgggaggatgagtggttgacggaggaaacccatcggatcgtcgtgatagtcatatctggagggtctatcttctgctaggtacaacaaaaaagattacgattatttgataccctgttcatgaatgctctagactcctttgataattgtaggttcggctagtaggttagatctaggtaattttgttgcataagtgatcactcgtccgccaacacaaggtagttcagtataacatactagtatctactatttgacccatgtggttatacacattgtatgactctaagtagacacatatccaagtgtatatataggtgttctcacaactcacactcagcagctctaacctccctcgctacagcattgcaaagctcaactttaacaccagctcctaacaagatatggatccaaaggcgctgagtatcactcagccgatcattctccgacttaacctcagcgaacatcaccgtcctcgtctcatgattccagaggaacaagtccgggattcccccaccgcgctgctggtactcctgcgccataaccttgcagatagtagcaagtgcctctccccggaaacattgcacgatctcaactaagtcatctagatcaaaagaccagtcaagcccaacagcgcagggctgcgcctccgcctcacgagcatagacctcacggacgatccgctccgcatccccattcgtgatctcgacaagtcggtgattgatctccgatgcacgagacgggtagaagacatcagtgtggagatcgagcggacacgtctggaacgcagtttggaaaacattgggcacgtatgtaaacaggatatcgtaaaagagatagccgaactgtgatcaagatcagattaaaagctcaatcttccggatattccagactcaccagcgttcgcacaatccccccttcggagtgataccccttccatccatgatcgcggtaccaactcagacacatattctccaccctgcactcgccgccctccctctcatcaatccaaacagttgctttcccctttcgcggagcatcacccgtatcaatacggataccctcaatcgtgcgctcagccggcttgcctagcatgacatgtccgaaatcatgctgctcgcgctttaccacccgtagcgccttttccagcttcgtgatccgcttctgtaggtcgtaatgaaatatcagatggcacagcgggtcttctagtccggcctcgcacgtccgcagcgcaagtctcttccaatgcttgcgctggagttcttcgctgcgcccatctgcaggcgcaagcgcccacatgtagtgttcttccagcagtgccttgcgctggtaccaagcgccgcgccgcgccgcgtggaagagacgttgggcgagaagttcctctagcaactcgtgctcgcgtctatgctccttgaaccgcccgagcgcgtggagactcttgtggatgattcttgtgagcacccatgctggcgagaaccggcgtagataagcgccctcgccgctttcgtacatgttgtcttctttcttttgttcttgctcgacgagctctttccatcggggataggactggtaagcaaggtcgatgatttgttggagtgaggcggtcgtgactgggccgttgaattcgaggatgttgtcgatggcgaattgggtttgtatcgctgattcgaattccaatagcgtttctctggacgagaagatggagtttgagcggcagacaatatattcggggaaatttcttttgctcattttggctaggataattgttgtgagggacttttcggtccattcggtggaacgatagaatactaggtgcactcgctcgaagagagtgcgaggcactggcgagatcctgatacatccacccgtgtagtccaatatcttttgggtgaaatggctgtttctgttatttgcgtcttgaagtcctttttgcgtctggctcgtttcgcagagagccgccagcagctctttcttgctcttgccctgaaccttggcctcctttgcaaaggccttgagttcttgcagcaatagaagtgatgaagcctcttccagcgttgtgatcgcttctatgccttctgcaaatctgaacgtatctccgagttctgaaccaggcaggctgcgatcccgctgtaggtcctcagcaacagggagcaagtccgagatatcggagcagtagttcaaccggttgatacggtgccatgcagacgtcttgcggaggaacagtcgaacatacctagtaaagcattaatctcaactataggttatcacattctacaggaaaacatacagatactgggattcgtaggacagcccccgccactgcgcaaagatttccatttcggcctcgtcaaaaagatgcgattcctcatccagcacagtttccagtgcaaggttgaaggcatccacatagatggagcttttgcccttctgccagacgccatctcgtagcctcacatgtaatcccgtcttggtgtcgttctgtagggcctcgtactcctcgattgcgtccttgtcggtcttgatcgcaggaagggaagtttcgagttctgtttggctgctaggaacaatccctaaatcgtccgctgcgggggtctcccccgccgtggccgaaggactcggactcggtggtttaatatctgcgtctgtactagaatactccgtttcaacagttcgccgacgtttcgcgggacgctgcgtctcccagaagttcagcaaggacataatatctcgtttccatggatgcaatcagtcccaatgactcgagtctccaagtataagcagacacgaacgacgtgtctcgcgagcaggtttcgaacacgtgatcacgtgatccatatagctccatcagattgtttgtcctgtttgcgtatgacatagacacaagaggcacagccaaaagcataagaaaggtaaccaaacaaagacgatctgaaacgagagaagaaaaaatgccctctgaaatcattcgaaaagtccccaagtgcaacctctagatataaaaatggccttaccagtaagcagctctccctcctacaacggatcgatacctccgagctccacagcttccgctccgcgaacactcgcattccacttcttcccaaaatatacacctcccaggtactcaattaacctgtgcagcctcccaccctcgcgatctcagatccaccggcttcctcggctcctacagtcaccacagctcaacccccatccacaatgggcgaaacaaacggcactggctccaacacgccgcttggcgatttgggctatgtctctgcgggtcagattcgccccggtggcgcgcctgctcgcgtctatctcaatgagaaggtcgtgccgtatctgcttgatgggatgaagtctgttgcacgcgaacagtgagtggagtattgtgcctggctagcttttttatacttgtctactagatggatttactgatctccttgtctttcgcttttctgcactaggcctgccaatcctctccgtgtgctcggcgagttcttgcttcagaagagcaatgaggtggagggggagactaagaaggagtcggagtagaggggagaggggttgggatttctttgggcgtttcatggtgcttgatcagctattctgatattgtttttatttggttttgaaagcttgtgagtggactttaatgtacactacgatgttcaccacttgataccccggtcgatgtctatatctgtcctgttagtaggaaggatcaatagcagaaaacaagatagagagaatgatatctcgaaaagcgaggtggtgattatctggtataatagattgaggatctacgtacctatgaaagtacggggtagagtattatcaaataggcattttgcaaaaatagagcgttttggcgcatgaattctacatcttgcagtcctttgatctaacgctaaggagggcgaagaacatctaaaaacatatctagaaggtattataatgtgataccatcccaagtaggtcagactactgactactcaacttctgcgtcgtcgaagacacagaccacatgattgtacttctaaacggatatatagacaccggggtacagcttatgggaccatcgaatcatgagagccaaaatatgtattcaagtttggaagcttcatagagattcctaaatggagtaagtacaaggttgttctatatcccgaccaaatattcggggaagaacaaaatattcgaaaatgaaagcttcgaataaagcctagataggtcagcttgcaaaacacatctcacctttaatggcattccaaatcgattaatgcctggagtttaaaggttgagactacaagcgcaaagtcgacggctttgaattgggcgaatggttgatcattcagttgtttagagaagtcgaatacaatcgggccgttactggagatggtgtataggtgaagttgtagctgtagctgtgtgacgaatttgctgaccctgagataaccgaattacagcgataattttctgtccctttgccgctagaagtttttttccccgaagttgcgtcgcaaacagacatgaaagagatacctcatcaagcgaccgaagtgtgcatcgatgaagttgccgagtcgtggcgctccgtggttttttcttttttaaatcgtcgagccgagaattgacaaacaaagacagcgacgccccgtggcccgtcgcccaaatccagcattaaaacaatcccataaacaaagaaaaggggggaggaagtgggcaagttggtgaaacatgggaaccaggaaccaggagacatcaaaggccagtctctgttctggttagaaaataaggggaggcactttacctgccagcgtaccggtcctcgccggcaccgccgccgctgccaccgccaccgccaggagcaccaccagtgctgctgcgtgcctgaccttcgtaggaacgtccaccaccaccagcgtaggggtcgcgagcctcacggggaggggcagcagcatcgaagctaggagggttggcgtcacgatcgtagtagccagcgccgccgccaccgctgccgcgagattcctcagcacctccgcgacgttcatcgcggctgtaacggtcatcacggccaccgccgtagcggtcaccgccaccacggtatgcgtagtcgtcgcgtgattcacggcgaccaccatactcacggccaccaccaccgccaccaccagcgtagtcacggcggccatagtcacgtccgtagtcacggccatagtcacggcgatcattgtaagagtcgtagcgaccgtagcgggagtagtcatcatcgcgacgacgccagccgccaccggagggtccacggcgatcatcgtagcggtcacggcgaggaccacctccacggctaccaccaccaggaccacctgggggaccacctgggccatctaaagaggaaaaatgtaagtcgacgtaaggcgcaaggggacaggacgatgtgacttaccacgtttgggaggaccaaagtactttccaggggtaggggtacgagggcgtgcacgtcgagccttctcgatgctcagggtacgaccttcaataacttcgccctggagaccctccttggcggcatcagcctgctcggcggtgaccatgttcacgaaaccgaatccacgcgactccttggtgtggggatcaagcatgatagaacagttatcgacatcaccgtacttctcaaacagacgcgaaatatcagactcggtcagacgcgggtgaataccagtaacaaagaggttagagccagagttgatggcaccttcatcgtcttcctcgacaggtttgcgggccagaggagctctggggtttattagcttctaattgatataccggactagacaaatacatacctgtcatcagaacggccattgggggagcggctgcgagcacggtcgcggtcggctcgaggctcatcgcgaggagaggcgctgcgctcgcgatcatatcggggctcgtctattgaaaaagggtaaatattttcaagcgcatggaaacaattctaaaagacatacccgcgtagcggctggaatcgttgtcgtagtccgccatgatgaaaggactgaaggtgtaggttgaaagaaggaaggaaaagaagttggaaagctgataagagcggacgctaagcaccggaaactacacacccgaggaatcaggcagcggtgcaaacttgcgtggatttcaagtgaattggatgaattggagggaattgggagaataaaactagaggtttctttttccttttcaaaatacgagtttatgcagggggttatcttgactatgacaaacagctattatgccaagaccgaacaaatcgccatattaaagcttgatagtacatactcatacaactaagactaactcctgagattcgacgctaaaatcaaattcgtgaaccctatacccatcatgtccagaagttaatcatcgtgagcctcgcaaacgtagagtccgacgggtattttgttgtgaagcagccggggtactgggggtctggcccttcaggtctccatcatcaaccaagtccttcaacccttcgagttcatcttcatccaattcactgagttcttcactcattccacgcatgacatcccgtccagtccaccgttcctcgtgaacagtcgtaccgacagggtcaaagggttgcatgtaccattgaatgccacccaaagccaaagggagctgctggtcttgctcggtcaaaacaggcgttggatgtcgatagtaggcgttgacactctttatggggtcttcagcaggaggtagctcttctgccccagatgcttcagggtgttgttcacctgcagtaggctgggcttctgatggagcctcggtcgtaggaagcgtttcctcaactccttccatagcatcagggtgaccagacagctcagtatcaccttccggctcaacagaatcaccactgcgtgacatcacactgtggtcaagaatcatatccagctccttcaattccttctcgaacggtttgcggttgagttcgctctctttcctgatcgcatcctccagggaaggctggatgactttgattatccgctttgccaatttcctcttctcgcgttgctccaggctgagctccggggcgcgaccactgatctgcgcttggagttccgcggtatcgccagcgggctccacgccgatttctgaggtgaatagactggccaagtcagaagagaaggcagcgacggacggatagaatcgttcgttgagcctttgtcggattgacatcaaccctggtgcaaacacaccctttccatcgagcctagaatgaagtcagtatgagcgttgacaaactaggacgagtatatctcacagttgagctttctccaatattggccacagcaatgggaatgtagggaagtagacaagatcgacgatgttacgaagcatctctgcatccttcaacttctccctctcccgtttcttcacttcgtcgcatagcattctcaatcgatcaagatccttgtaaagtcgctcaccaaactcaatgcgacgctctagacgtctgtgtccgggtacacccattgctacatagtctcttcgtgtcatttccatagatgagaaggtctccagctgcaactggagtcgcttgagcaatgctgctccacgcctcgcctctcgtttcaatgtccaatacttggatgcatcttcagcatattgcttcctttggcggactgtaaatcgcccgagagaagcaatcactgagtttaacacaacctgggggataactggcgcaccggaaggcagcttccagattgttctgggaacacgtttccgtttatttccaccgactgttaacgtaaggcgaggagtgagggtgcgatcttcttctgctccatcattggggtgcgcagggcccatcgagagagctgcagcttggctgtctccccagcgtctaccttgcatagtattgcgatagtattcgatagcatcggcagttgcagcatcagtaccatgctccaatcgccagtcagaaggaacgtgcttgtcgcagaaagccttgagaaggtgcgagtccataagaccatggccaatcttcatctttagataaagttgagctctgcgtgcacatgagacatggaaagcaacaaagcagtttttgttgctgcactgaatggatgcacccatccgctgtttgcagatgtagcaattcaacttccagcggctgcgtggaaccttttcgacatcggtcaccggctccataagagatggattaccaatagaaacttcaggaatccagaaagagcagagtaaatgagcccatttagaggaggttgtttgtttgaatgcgccctcagtgtttgggcagaagatacaattggtggatcctcttcccagcaactggcacttgcggcagagccactgaccttctggaatgaaaggaacaccataacactcttgatgcactgcaaggtcgcagccatcgcagaaaacaattgcattcgagttttcacaatcgccatcatcacagatagcacacttgctgtcttgttcttcgcccggtcccgctgtttcgccattgactgcagctgccgagctagagcgaagacgtccggtctgcgggggtttgggattcggcttggggatgcgcttctcaagggcatgccattccctctcaattttggtcatggtaatctcaaacacagcgggcttgatgggctcgagctgatcttcacggcgcttggcattgtattcctccaaccatttttcatcctgttcatccatgtcatattccacacgtccaatggtagtgttaacgtctccatctgtcatggcaggttgaatcacatcaaggtcatcttcttgggtgccttcggtcatccgaataaatcgccggtcatggcgcagaaagagatcactctcctggtatcccacgtttgccatggtccgatcgacatagttttgatgaccgacgcccttcttctcatagaatgtgaaagggtcacgcagtctgaacgacggtttggggagtgtgagtttctcccgggggtttgggcccggaggcggtatgattttttgtccttgctgggcaagaagggcattaaggatagcctcggggcgacgaggtggacggccaggcctgcgtttgattgggattggagaggccatttcgcctgatatgatgactggtgatcctgaaaggtccgagattgtcgcaccagccagtgactccaggcttaagataggacctgaggtatctggagcatcaacctcttcagacgtgaagacagcaattttgccatcaatgtccaagtcgggatgaaactcttcccacccgcgttcttcgcgtggcttgtacccatcgccttgttggagagcaagagcggcggccgttgaagaggtgaaccgaccacgggcttggttcttgtcgcgccttggacgcgacatagagggcggtgttgttggtatgatgggaggtggcggtggaggggctagaaatggttgctccatctcatgtggtggacggcttcgagcacttgcggagtggcggcggggagtagttctcttagaagtttctggggcagtggcggcgacgactgctgcttcagcgtcgaaatcgatgaatcttcctcctcctccagggccacctggaacgtactttcgcttctttgaaggagggccgtcaggggaatcgacggagcggctgttggatgatttgagggaagacctaggtttactgcgtgatgatcgacctgagattgaatgtctggccgtcggtgccataattcaagaacaagctttcgggtgtgtatgtgctcgttggggatgaggattgttaatcggacggcgtcaggtcgcgttcagggcctgactcaggcagggcctcgggaaatatcaaagtcgcaagtatcaagtcatgcgacaggaaactagaaaaagaactagacacaatggacgtaaaggacgccagagcccgtggaacctgcaaggcgcgatgaggtgtttggttatctagtcaaggcggagacgcctgagctgtctgggccttttggcctgaggcgccaatctggacttgaagcacctccgcaggttgacatgggacatgacatccacagctatcctttgcgacctatctgcgattttactcattcgatcgagccttgattttttttttctttcacatagatttacaacatgagcggttctagcgacaccaggtacgcgttatctacctcaaaacaccgcgcagttcagcttcgctaactgttattgccctcctcagatggcggggcggacccagtcgccagggatcgcagcgcaactcgaacaaccgtgataaaacaggaggacagggaagcgcacgggataacaatgctacctggggcgcatccaaccctccgcaggaacagcatgttcctgtacggggcttcaacaccgcagaggtcaagaacgtcctgaagggtatgtatatgcatctaatctccaagtacaagggctaaccaagctttcgcgatatagcaggacctcatggtacgccttatcgctgcctccatatatactcaagcctaacctatgcgccatcgatacagaaaccaagtcggcggtgccctacaaatctcattctaaagacggccctacccaacgatctactgcctggggtgccaagggtacagtctctctttgatcgcagcatacccttgagcgaagaataaccatatctacagcacaaaacatggcgaacggcagagacttcttcctggagcttcggaaacagattacttcgctgcagcgaagcggtccccctgtcggcggctgatcacgacgtttacgacttcattatctcaaagtacttgcattgcacagtcggtcggtcgcgagtttggttcgttttcatgggttgctacggcgcatcttcgataccctactgtggaggatgcatgggtgatgagtggactcggaagttacatggcatcggcgtctccgatggttctgggtcttacatgtccataatgcactatgactcctgtttttcaaatttattcattacaattcatgcgctgcatcgaagtttatggcgatgcattattttacacacgctattatacagagagggcatgtcactaatatacaagcaggtagccattcagctacaattttcacaatttgatccacccccctgggccaaggatacctccatcatcagcctgcgagtcgagggtccatgtccgcagaggacgacagctgaggtcggatcggaagccagcttcgaacatctcaatgcccgcccacccaatcatggccgcattgtcggtacacaaatatggaggcggagcaacaatcttgatatggccaaaaccgcgcacttccaaaaatgaagtaagcactttcatgaggaactggttagcggcaacaccaccactgacaacgagggtgttgatgtcattcttgccattattgtgcggccgcagagtctccagagcgatgacagtgcgcgaggcaaggtgctcgaaacagacgcgcatggtttcccggcctagatcgacacgctctgcattcgatatcttaatattcgtaccgttactttgaatgatcctgccgaccgtgctcgaaatcgaagcaaagctgaactgcatatgccgcgtattcgcaaatggagtcgtaagataccagccccaatcgcttatgcgcttggctatttcttcaccccgagtctctggcggcgagtaatccgcaaaatcggccttgccgttagggaagacgaattgctctagattcttgccgtacatggtacttttagcttcttgaagcaaagaatcaggtagaatatctcgtgcagatttatccagtgcctctccaatagcgatatcgtcgctgttagcgagaatcctatgttctgtgaggccttccgaatgaaccagagtcgtatggccgccagaggcgagaatagacaagaaagggaattcgggcggtgtggatgggtcggccttgagttcatttcccaggcatgaaacgagtcggggtgtcaaaagatgtgcctgcatgtggtgcactccgaccatggggatctgccatgcaaccgacagcgcttttccagtgtcgaggccaacggacaggttagaccgcattccggggcctcttgtagcggatatgaaatcggggaggcggcgacaagtcccatctgccaatttaagtccatcgccagtttttgaccccggtaggtaattaagggctttctgtagaagctttgcgaggttggcttggtgggattcgagagcgatgatagggtgaattccgcgatgcgcgcgtgtgtcggccattacattttcgaggaaatgaattttggccgtgctcccggagtctttctttgttttctcaacgatagctactgatgtatcgtcactgttgttggcaaccaataattagttgagtgaccttctttttcgggtgttcatctccgcttaccatgacgtttcaattgccaacgtgagcaagccacggcgggaggctaaacatctccctgcatttagcgccgacctgcgaaaactcgcagcagggctcactgagaataacattggtaaaatgcttgacgtacgatcggtggcaggggcgaaaaagatcggaggcgcacgggccggagaagcccttgaatggagccctaaacaggtaccaaaatagccatctatagtgatcgagctacggagtacgtcccaaagaatcctacatacaacaacccaacagggattggttgggcggaagctaaggccggtatcttgctattggaatcgcgcatatatggctgaggatagttactattgtatttgcactaacgaacgactaggttaaacatttatactcaaaaatcaaaatcatcaatccagatcccatcataacgtcataaatatattgtttctccaaggcactgatacatcgagttcccttcagaatgtgcggcgcgcaccaaaccccagtcagcccagatgaatgatactgacgagttctgggccagcaaaaagcgcgaggcggcatagtcatccacagaaccatcttgcgaaggctggacggatacgttaatgcgcccttctgtcgtttcaattcgcagtttgaggacgtcgattgtcaggagcgctaggtgctccgtaaattgatccaacaaaagaaccggggtgtagggcgtagcatcattgcaagatgtagaccccgaatcattcagaagcacctggtcgctcccattactccagccgtgaaaggtcattaatgataaaaatctcgaacatgatctcactgccggaccgtccatcgccgctcttctcgtgacatcttcatgtgcttgccgtaatactcgtctggattctcaataggcgttacgcagtgaacagtcggtgtccctttgaattgtatacgcttgtcaacagtgccagcgcgagaggacgactgcttcttgaggatgctctttgatgaacaagagtttgtgtatgcataattcggaacctgcagtgaggaaaacctcttgctcgtcgggctcgccgcggagattggcgagacaggcgtgcgagggagagcacttggtgacttgagtgatagcgatggccgaggaacattctgcgcagcagagatgctcaaggatagctttggcttgacgacacgggcagtgtacattgtgacggatgaagaagtttagtacaacagtgcagttgatgttattgcgacttggttttcacggggaaactttgctcaacaaagatatccgagtaggcaaggagaggaacaaattattgacgtagatgtataaggagctgaagaacttgggccagccaaggcgaagagacaaaaatagaaaaataagaaaataagaaaataagaaaatctcaaacgatacggagtatgcaaaacagtctcctgggggggaaagagggcggctatatacacttgagggggagaggggaaccaaggaggactgccaaccaccttcttctgcctaagcgcctactctatgcacgacggtgcatatatcacaatcactatcactatcacgcccgagtttctaaacttagacaagccttcattccatgcagccaattaaattccccacggggtgcaactcccgtctaatgtgatgtgatggacgggctgtccaacatgccctgcagccaactgcacatggtcttccaccctggtcttcttccctggtcgtcctgtccatttgattcgaaactctcgaccgatgatcactcaataggtgagggatatcgcacttacataaagtggattcctgcattattcggtgatatccccgcattatcacagtggctggcagtcagcagcgaaatatgattggtttgaatcttggcaggattgttgtgacctactataattagatatcacatgggtttgatgccgctatcaactatttttactcgagattgagcgatgaatgatgtccatcaatccttcgatatagtagacgcagttgtaacatattggtcacatttcgtcttttggggagccaattgacctctagtcctgacaagataatgctcatctatgttacatttctcttgcgtgatcgtcctagtgactcgatttccttattttcaaatatagcacgtatctgtacggagtacgatgcaatgattgaatatgttttattaatagtgcatctacaaccaacgaagagtggttgacatgtatacatatggagtacgtactatacttactcggaaaacaccaggggaggaagagattggttatgacatgagcgactagctatccaaagtgggcgtatgacttgacctgataccaggtggttagaatgcaggacaagcacatgggacaaacatatatagaaaacacgtaaagcttggaataaatcactcactcgagctcctataagtttaggaaatagcatcctacggggggctcagtgttcggacatagcttgttatgaggatgaagctcttgtttgttcagatcagttaggatattgagctgtgatgggttgggataaatgcatcttgggaggagatgggcttgtagagatattgtagatcactatttgagttcatggttactatgaataactaaactcgaacaaaaattgacaatgtctttgttttccaaggtgtactccgtagaagtcttataaagaactcggagaagaagtggagcgtatgagcgacgacaatgctactgtatatgtactagatacggagcatgatttacaggggtatcttattgatccacctttgataaacaaaagagtccgccatttctcgaagatgttaacctcgggacatccataaaatgagtttaatatggccagctgggacttggaggttctatattataacagcctcggtagcactgccagatgtaagggcactcgctaggataacttgtattcctcgctatcttagatatagtaacccgctttcgaattgattgtttgtctcctctataccgcggatctgcaatcttgtatggagacatcgtctagaatccctccgggactgccggcaaacctttagctgtcaatcgtttctggagctccaaaggcttaagctcaagaaaaggaccctcaagaccgggagtcgcgggtgttatagctacaccgctacaccccactactgcaatgtatgtgctgatgatcctgatttataaatagaataaccgctgtcagtgagtccaacccttgcaattgagtttggtgaaagccggagatgtttagcatgaactatagcaatagctagaaagcatgccagaaagcatgcattatctgatcgattgcggagaaacaggggataacggtagtcacatcaacacccggactcggctcaactccggcaggcttgggaggagaggggaaaagacgagatgagccaatccaagtggaattctccaaattccttccccaccgcactccgcaccgaactcggagactttccttttcgtcttttcgtctttttgtcttttcgccttttcgtccacagactcaccggttccgaatgggccatgtgacaggatccggtttcttcctcatctgatccttctctttgaaagtcggctgcacgtctcgggtagtgtggtctagatcccgtgtatataccgtggctcatggcgagaaaccaaagggttcgcgaaccagaagtactagttgaggctaattcagggacacatttctatacataacatatactatgtagatatcgagatatccataatgtggagatcggtccaaggcgagactctccgatccgggtaaataacacgccataatgagaaaccccaagggatcgaaaaaaatcaaaaaaaaaaaaaaaaaatcaacgtggccacgacaacgaaaaggtattgttattagagaattaaaatatcaaatctatctagattacgaatagtcactcaaatattataagaaacaataaggaaactttgcagagtgggctccttatattaaagtatcataactttttctattgactcagtcctccctcttctccacatccctcgctcccttccttcccccagtttttctctttgtgcggccgattttttttttgtttagaactcaaaatcaacttggatatacacaatggccagcgtaacagaagctgtgaaggaatcgttcctgggccacaccgaggggcctcatctgtccttccaggcgcgctcaaacttcctccgccatgcgcaaaaggacgagaatggtgacctcttcatggatgaggagaacttcatcgatgccgtggcaccgaagcaggaagactatgtaagtatcaccacggactgcagaggtaccaaaatcttcgcaattgctcatctggtttcctaccgcggcagcacaagattaagcgcgaacaatatggcatccttttcagcgtcgcagaccgacggagagccggcaggctgaacattaccgactgggcctccttcgaaaacctcctcgcgaagcccgacgccgagtacgagatcgcctttcgtctcttcgacttcgatggatccggcactgtcaacttcgacacggtgcagggactgtacaacctgaacaagagtccggacagcattcccttcaactggagctcggagtgggcatcgctgtacggaggccgctcaaagtctcgccatgacatgacctacccccaattcgcccagatgctgcgcggtctgcagggtgagcgcatccgccaagctttccacatcttcgacaaggatggggatggctttatccagcccgaggaattccagcgtatcatcctcgagacctcaaaacacaaactctccgactacgtcctggagaacctccccaccctgtgcaatatctcgacgagcaaccgcatctcttacgccaatgtccgtgctttccagaatgtcatgcgcgagatggatatcattgatttggttgtccgcgaagcaatagagaagagctccgatggcaagatcacccgtaccgacttcctggacgaggccgctcgcgtgacccgtttctcgcagttcacacccatggaggccgatattctgttccacttcgctggcctggatgcgccttcgggacgtctctcgcagcgagactttgccaaggtcatcgatgcttcatggcgtatccccgtgatcgctgtaagccatgccatgactaccggagaggaagttgtcgagaagaccaagagtctgctgcacaacgttcttgagtcggctcaccactttgctttgggcagtatcgctggtgcttttggtgctttcatggtctaccccattgatttggtcaagacccgcctgcagaaccagcgttcgtctcgccccggcgagagactgtacaacaactccatcgattgcgctaggaaggttatccgcaacgagggtttcactggcttgtactccggtgtcattcctcagttgatcggtgtggcgcctgaaaaggctatcaagctgaccgtgaacgatctcgttcgtggccacttcacagacaaggaaaccaaccggatcaagtaccctcacgagcttctggctggtggaactgcgggtgcttgtcaagtcgtcttcacaaacccccttgagattgtgaagatccgtctgcaggtccagggtgaaatcgcaaagaacgtcgagggtacccctcgccgctcggctctctggattgtcaagaacctcggtttggtaggcctgtacaagggagctaccgcctgtcttctccgcgatgtgcccttctcggccatctacttccccacatacgcacacttgaagtccgacttcttcggcgaaaccgctacaaagaagctgggcgttgtccagctcctcaccgctggtgccatcgccggtatgcccgccgcctacctcaccaccccatgcgacgtcatcaagacccgtctgcaggtcgaagcccgtaagggtgaaaccaagtaccacggtctgcgccactgcgctgctaccgtctggaaagaagagggtctggctgccttcttcaagggtggacccgcccgtatcatgcgttcttcgccccagttcggtttcaccctcgccgcttacgaggtcctgcagaaaaccttccccatgcccggtgagggcgaagccattaccccgactggcttcgtcgagcctagtgtcggtgggcagggtgctaccgcgcccctgccttacctccgatcaaggaacgcgctcaagatcatccttgacctggatgagaactttggccgtgtgaagatcccacggcctgagaactggcccaacttcatgcggagctcgaagtagacaggcttgctgtatctagtgaacctgcgatttctagtctttgtttcttcatttttgttactagcgatatgtttcccatttctcatttggtcaaggcctacctttccctcgatttagcatgagatctttctcacatttcttttggattattttcctctccgccctcttcatggttcaattgggcttgatttgggacgtgcatccacgcccccctttgcatcatattgtcttctctttcttgtcggagaacacctgtgtttgcattgtaccaatagtagatagatttggaaagaaggtgtgtgggttgtattagaggccctggttgtggtggttctatcaatctagatctggtccgagttgttattctccggtttgtgtggatggaagcgtagatatatatatggccggatgtggttcgtggttgatataagttatgcctagagagcagatagatcctgtctagagcaacggaatatttggctgcatttgtattgcagtatttaaattttattgatttggagttatctatctggaaaatatgtacatgaagcatgatttgcaagttcgcaaacgggtatcggaatctactctcaaggaaagattccctgtacagatgatgttacatttatatcctcgaggatatatcggtcatggactggggccatgtgtgggaaatgccaaacccaattgtcgtggatagaggggaatcctatcgtgatctagaagatcaattcgacatcttaagccggcagcggcctaatggggtagtgtataccccgagttcacaaggccgatgctcaagaccagaggcacattctcgatgaagaccaaagtagtccccattcaatagaatctaagctttcgtgtcggctctgtcttaggaacctcatcggtgcctttgccttccgaagactgtgcgggctgcttttgttctttctcgggctcctggcgcttctctgcttgtgtctgggcggtcttcttctcatgccatagggaatcttcggcttcaatctcgcgcagcactagatagaaatagtcagacaccagccctcaaaatatagttggatattggctaacacaccctcatcccactctcgttcctttgcctcatcgcccgttcccagtaacttctcaacatcgaccttctctccattcttgactcgtgcaataatctccgctagaagttcgatcttcgcatccgtcgtccgagtatacgccgcatagccgttcttcaaggtgagcatgcgaatggcttgcgacccgatcagggtaaacatgatgatgtagaacgtcgccgggttccattccttggatttctctttcgcaggatccttgcgcgccctgccaccccgaagaaatcggggaatcattgccgtccatactgacgtgtctgcgatcttcggaaggcgatcggaggtcgaatatgagcgccgagtcggggcgcggcattgtctggtagcatttgacgtagaaggagcagaaaatatctgtctgctgagcccaaagggcttgaatctgaaagccataacctgttcgcgtctagcagcaactgtcggttctcagaagcgggaaaagttgaggtcgtggttgcctgaggcgataaggctatcaacgccaaatacggtatagcgcagttgttgctgcgacaaccccccgtttacagtccggccgatagcgattgcacatcaaaggcttgacgcgagcgatgacctcagtcctgcagcttcaatagaacgaccgaaaaaatggcggtcaccgtcttaccgtcaagctctctaacagagtccgtgaaacaggccctccgctcaacgacaacatgctcggacgctaccgtgttgtccctccaaacactcctccgcgggtcgccaaagatgcccgagaaacccacgaaacgcacaaaatccacaagagatccagtcgcggcgccgagccgaacgagaaattcccgcgcgacaaagacgaaacctgcaaatgatgctacgctccaatcattcgccgatcacgatgcggcggcgttgtcgtgtcaggagaaactggtctttgctacagaggtattcaacgccacgttaaagaccctcacggacgccgcgaaactatctacagccaagcgccagaataatacatccgacattgccaatgggcccgacgcaggaatcgtctcggctgcggagtgtgcgagactttctttgtccacactgcgcactctcaagaatgatgctgggaatgacctgttcccgaacatgcagctcgaacaggggctgtgtgttcttgcgggaaagcttatttcgctgggactgaacgacatggcatataaagagcttcgacttttgaagcggagaatccaacaacatttggatcgcggaaaggccgggaagaagaccacagaagcaaaggatgtggtggaagaagaatcttcgaaggaaagaatgtcggatctcttgacgtttgctcacatctcgaacgcaaagtcgctatacgccttgcttgttccctttcactcgaatgtgatgcgcctatttgctgcggataaaagagcctccacgatccaaaaggcttgctcttcattgcaactttctgatgcgagtagtcctgctcaagttattttggctgccttgaaatcaggccaactatcaaatgacaaagctgctctccaactccagctattatcgaataccgttctatcgctttgctcggggacatttttctcgaaggatgaggcctcgaatggcttgaagccaatgacctcattggcccttcaattactttccctcgaggttcgatgtttgggctggaagttgtccggtcatgtctatgatgagagcaaagaagtatttgatcctttgcttcgctattttggtagcttttctcaccggagcaagggtattgacaaagctgagtttgcttcaatttacaaaaccgttacccggttgcaaacatccattgcagaggtcaagaagaagtattcagaaacacaaaacgccaaccaggctgccaagctcatgactattctcgggcagcttgctttcgacgcgggttgttttgatgagtctatgaagctgttcacggaagccatcaatccgctttcaaaaacccagtctctttcgctcgcaacagttcggtgtaaaattgcatctgttcattttcaggcttcgaagacatcaaaaaagttcctgaacggagctttggattctgtgtcagaggcgactcaatccctaggattgcaattaagaggcagcgcaaacgatctagatgaactgctggtggaagctgcaagactgaagaagctggctcttgcgtggttcggagaggctattacaaaaggttctgagagcgaaagcgcgaaaaacgaagttgctagtcaaatcagggaatatctgcaagcgtttatcaggtttctcagacgctttgttggacgccaaccaacagaagacagcgacgaaaatgagatcgagatgttcaacaaacgcatttcaatttctagaagcatcattctaactgccattgactctactgtcgcaatcgggaaactttctatcatgtctcagaggccaccttgggaagacatgcttccaattctggctgatagccatcgcctgctctcgaccatcgaaaccaccgatgaaaataatacagagatatcagaaggcctagggatggcacttgtgaagctttcaaacttgttctggtctcgatacatcaaggaaaaagaggccggacagggttatcgagacctcataccccttctcaaacaatctgtccagctactttcaagttgttcgcctcctcaacgcaacacggcatttgcagctctcaagttcgagagactggctcatctttacatcgagggcaacatgtacattgaatcagagcaaatgttccgaaaatcgattgaagaatacatactctctggcaccctagaccagattgctaagagcagcggaggacagaatccaagttcgctcaatctggatcctaagagccctggtttcatgcttggccgtgtattttctgcccttctgaagatgaagctgcgcaggaagggatcccacccgtccgttgtctatgatgatgttgaactagaattcgaacagagatgtcttcttattgaatggcagatgagtttgcttgttgaaatgcctggttattcttcaaatgaagaagagtttcgcttgattctcggctcagctgtttcttcactcctcgatctctacccctttgacgtctatcctattcgccgttctcgtgtgattctctctgccttgcggcttctattggagcagcccactgccttggattcgtctttgattcaatccctgctggatgcaggagcagaggctttggataccggcttacaggtccgagaagatgtcgatcttgcttcatttgcaatccacattaacaactcattgcgcgttatcattggcttccaccgtggcaagatcgatgcaagcgaattagacgacacgcttgcgtcgtggaactcgttggcgtcccagtcccatgactggaaaacattgctgctctgcatcaatgacacggactactgggtcctgcagctgaaggccctagttgattataccgaaatccacgggctttggaaggctcagctatgcaccctggaacttatattgcgtgccgcggagctccagcaatcaggggatctgtcagacgctatcataattctgtcgcgcttggtactgcagaattgccgtctgggctactgccagaaggcaggtgaactgctatcgcgtggtgagcagtatcttgcgcaaaccaaggtttcttctcttgctaccatttcctataaagtcgcacgggtggaatatcttctagagaccggagagatcgagaaagccgccgccgttctttcagcagcccgctcactgtacgaaaaatgccaaaggtcagaactaagcagcttgactgtcctgtcgaagatctcatgggaaagactggtagcagatgctgcctttgttcagtccaggttgttctccgtacagggctcagcgacccaagctctgtacttcgcaaagttgtctgtaaggctcaactgccgcatatgggccaaggttgagagactcgcccaaagaaagcaagacaagctcttgcctgcttcagggaattctgatgttgaggctgttgctgatggtatagcaaagcttgatttgtctcagaatgggtgttccccggatgtgtctgccagctacatccaaggtgcgcctttctggcctcacctaggttctcaccatacctgcttgttgaacctcgccactttatctgcccaccatggcttgttccaggatgctatctattacggcgaacaagcgctgaagattgacaagacccttgatgccaatgtacggctactggcggcgcagacccagctcggttgccattggattcttagtggccacatgaacgagggtcaggatcatctctctgcagcggccgaatcttctaaacaatcccagaacagtattgaaacggtgtcttttcaaatggcccttgcgtctctgtacaaggcgcaaggtgcacatgacaaggcattgcgcgttctccttgaagcagataaaatcatcacagcggtcacctgtgccgatatgactgctaatctggagatgtcaggcatggcagaaatcgaagaaaagatggacaagttacgggttagagcaaccagccggcgaactccaacacctcgaaccccgacacctacggctagtactactcggcggacacgtgcaaccagttccgctgctcccaaaaccccaaagaaagctccagctccaaaatcaattctcccggacgttcaatctcaatccctattacaacttaaaggcaacatccttcgacagcaagctgattgcctgcggaagttgcgtgactttgagcgatctgcgcaaacacttgcagaggctagacaatttgccgtggcccgagaaagcaagatcactctggagatcggtgaaagcgagcacctgttggctgatgcaattcgccgctttgccagccatgctgtgtactgcgtcttacccgaatctacaatctcgctgccgtcactcaaaacaccaagcaagacggcagaggagcctaatttacccccggcaagaccgacaaggagaacgagagctcccgccaaaacaacgcgcactaaggctcaacgagccagtgatgacttttcggttatgctgtctaaggcgagcgattgtcttgccagtgttttctccgatgccacaattctaggctcgacgcttgacagccatgcggcatctcgcttgatgagtcggatctctatgctatcacatgcgacttcccctggaataccaacggctctggcccagtcgcccgcaaatatgaatggtaagttttgcgaggtcctttctggttgacggatatctgacttttcaattagagattggacgtgttggcgcatttgcccgggagcgcatggcgattgatatcgatcgacagttggccgattttgccgaccctcttctttggccaacctcgttcccttcagcggtcgagcttgacaatgatctttgctccaactttacacgagattatgtcgacattctgcccgagacttggaatgttctttctttgtcattgagtgcagaccataccgaatttgtggtttctcgactccaaaaagaccgctcgccattccttctgcgccttcccctccaccgaggaaattcagaagatgatgatgaagagcaatttacctttgaggacggaaaggaggaaatgcaagaactcattaagctcgccaacgaaagtgcacatgcagccaaggcccagacggacaagttgtcgaagaaggaatggtggaagacccgcgaagcgctcgatcgtcggatggaaaatgtacttcaaaatattgagaacatatggtttggagggttccgcggtgtgttttcgcctctgtcacgggatactaccgcgctggtccggttcgcaagcaccttccaaagcatccttgacaagcatcttccttctcggcaaaagggtggcaaggccgctggcccccgactcacactacatcagaatgtggtggacttgttcattgggcttcgcgatcttgaagaacaagaggagcccgaggacacgctgatggatcttctttactttgtcgttgatatcctacaattccagggcgagcgcaatgcctacgacgagattgacttcgatatgatggtcgtagataccctcgatgccttgcgagggtatcatgaagctgcgcgcgatgaacttgcagcacggccgccgagacatacaatcctcgtgctcgataaagctctccacctattcccatgggagtcacttccctgtctccaaggataccctgtttgtcgcgtcccatccctcgaatgcctcagggaccgagttcttcaattccgcgaggcatcctccggagccattgtggaccgcaactctggtggatttgtcctcaacccaacaggcgacctgcacacaacgcaaaaaacgtttgaacaagatctctcccggttcaaatcctggactgcaattgtgcagcgcgaaccaactgaagatgaattccgcgacgtactggaaaagaaaggcctattcctgtacttcggccacggcagcggcgcgcagtacatccgcggccgcacgatcaagcggctcacgcaatgtgctgttactttcctcatgggatgtagcagcggcactttgaccgaagccggcgagtatgagccctacgggacgccgatgaattatctccatgcaggcagccccgcgctcgtggctacgctgtgggatgtcacggatcgggacattgaccggtttaccacgactgcctttgacgcttggggtctggtcgaaaagaaggataaaaaggataagagccgaggggaggatgttgggcttgacacggcaattgcgcgctcgaggggtgcgtgtgtgttgaggtatctcaacggcgcagcgcctgtggtttatggagttccggtgtttttggagtgaattgagttcatgtttctctcttattttgtatatatacctggcgttttctccactgtgggcagcaatctgatttgactcttcatgctcgacctttcaatgggttattgttaatatatatgtccatctgttatggtatatcctatctaaggtgcagttaatagactagacaatgtccaatgcagtagctctaaaccctgacatcgaatatcatctagatacatagactatctatatactcctgtaaaatctataaaatccgaaataggaagaattatcctatcgaggtggacctcttttcccctcatgcgggacacattccccccaccttaaaacgtcaacgtctcccggctcgtagctttctgttctctttcttttctccttctaacattggaagatacatcaaaatgtccgtcaccacaaacgcaaccatcgcctccttcggtggcaagctcttaaagctaagccatgccgccacaaccacaaaatgcgagatgaaattcaacctcttcttgcccccgcaggcccagacacagaaagtccctgtactgatctacctctccggtctgacctgcaccgccgataactgctccgagaagggctttttccagcacagcgccagcaagaagggaattgctgtgctgtaccctgataccagcccacgtatgtgtcttctgttttatcgcgtgaattttccatatacctttctatcaattgaagtcatacggttgaaaagtaaagaattatataattaacatgctcatcttctaggcggcctcaacatccaaggcgaggacgatgcatacgacttcggctccggcgccggcttctacgtcgacgccaccaaagccccctacaacgccggctataacatgtatagctatgtcaccaatgaattgccacagaccgtctttgctgctttcccgcagttggatgccagccgtgttagtattactggccacagtatgggcggacacggtgctctcactttggtaagttatacactgcggcacaaaagctggaaagaatatcttgtattggagtaatatttatctaaccattcatcagttcctccgtaacccaggcaagtacaagtccgtctctgccttcgcgccgatcacgaacccgacgaactgcccctggggccagaaggcgttcaagggctacttcggcgatgatcagcaggataagtggaaggagcacgatgctaccgagttgattaagaagtggagtgggggtccgctggatatcctgattgatgtggtgagttatctcctccctttcttctgtgtatcgtaacacgtctaacctatatacagggcaccggcgacaacttctacaaacaaggccagctgctcccggagaacttcgaggccgcagcccgtgacgctggaatcgccggcttgaatgttcgctaccagcctgactatgaccactcctattataccatggctacctttgcggatgaccatgttgagcatgcggccaagtatctctttgcatagtgtgtgctctcttcttaactcctaatctcaaaaccattatgttttacttcttgtcttgcgtatttcttagtaaacgggatctgattggtttttcttttggctcaagtgggctacaggctgttcggtcgatgatctagatggtgtgagaaccgaatgagaaggtattattatgctatggatagtgcaatcatcttgcaatgctaactcaaggttaccttatgctacacattttgccggggtatgagtgacttacatcgaactttcctgaaatagctttgatgtttcgctcaagaactagttccgtaggcttgcagatcccaaagccttctggtataccgatccagctagttgggatggtgttctcgttgaaaatggggcgtattgcgtggattccaccttggccttcaataaccgtaaatcctatcagttgctcaccgtagaaattgagtgtgacggaaccccctggtagccgataccccaaaagtacatttggcctttcgggatctgcattcagcaggtcgaagccagtaatataggtctctgctccctcacgttggatagagactgctaagccgttgatagagctttctaatagaacgacttgagaaaagagcttatgttctgcccagcaaatgcggcattcattctcttttcccccatgtctgttttctggtctgctgtctctatcgcatcggaactcagtagaaacctccttccagcataactcattaagtaacccctggttcgagacaatatgctcgtccgacgttctgatcatagaacatctttctattagccatcggttatttctccaccgtcgccgtgttgcccagaggtgctcatcacaccgatcgatccttgctgtacagcggtatatgagtcgccagtttttgctctcacgttttctgggattttctgctaggcagttcagaaatccacgatctccattctgtgaaaatcttgacttccagaatgattcaattccgaacacaactgccattgctcgggatgattgccgtagtcttaggaagtcagcagtacgaagataagttgcgatttgaactcgtatctcgagaggcaggatgctaaagcagtcagagtcatgcacaactctactcttcgagccagagtgctttcgtcttttcggcatcttcgggaattgtctcgcagcatcctgaagtcccttgataatgggtcgttttgcagggcgaaaatgatgccgcaatccgagatccccgcagttgtctaggtctgttaaaaaagccggcaccaatattgccatggccacttactccaatagtctcgtcttcccggaggaggaatttccttacagacttcaaaaagcctgtttaaatcaatatcctccccttcaaattgctggaccaagagagaccagcagctctcatggactaagaaagccttgtggggcttttctatgtgcatgaaataccaagattcaagtttattaggatcaccgaacgcttcttcaaccacccagtcaaacttggttttattaacacctgacagttggattccgcttctggtccgatatactatggtggatgagcccggtgcaagaagtgtacttataacatagggatcaaactcacatactcggtaccttgccatccaaggagcctcagggcaaatagttgctgcgcaagatacacagtgactggaataatcagaatcactgttctccgtaagtaagctcatctggaaaaatttgagaaggacaatctgatgtgggggcagagatctataaatatgccaatctgtagaggggtcactatgacctcagtctatctatactcacttagaatgaccttattgaagataacatgacaggagaactgcagtcgaatcatctccttagataatagcccagagagcaatactaataagatagttagaagattagaagtctgacatgtgtcttccttaaattcaaacgagtgatatttgtctctgattatatttcatcccttatcacccttggaatcgtctctccttaataagtgagctcgatttactcacttcgctttattgaaacaagtgttcttccatcgctacacctatcaagcctcattggctctcgtgtccactatactgctctattgctaaacagaggctttttgttattcgtcaataagttttttcctctgcaatacccgactctaagatattgtttctcttctttctactaaatcagtagattcgacaaagaattacatcaaacagttacaagatccacttgtattgcaaggaggcgcttggcctaatgaggttagtataggtgattacctaagcaggctaaaattcacgatgtcctcggtagcctcaggcatctacgctaacctattttggctaaaatggcctccctacggcgcgccgcaacgcgaactccagaaaccaaaatcacaaagctttcaacccaactcgacctcaactctcaactacctttctcatctgctttccagtcattttacacctcttttctctgcattttatcctctcaactgcgacaattttacatacacaagctccattatgtaagatttttcgcagcggttcccgtgtctggcactgaccatcctacagggagagcttcgacaacatctacttagacctttcaaagcaacctggaaaatgcaagcttgctgaaagtggtctgggctggcgtccgtctggtggtggcgatactttcacgctcgacagcagcaacatcggtgcagcccagtggagtcgcgctgcgaaaggctttgagctgaaaatcctgtcgcgatcgtctggagtgatccaactggatggattcgaccaagaggtatactacaccgaacattttgcgaccattggcctacagactgacaaccgaaaaggacttggagcgactgagcaaagcatttaagatttggtacggcattaacgtggagacccgtgagcacgctctgcggggatggaactggggcaaggcagaattcacaaaggcagagctggcctttaacgtccaaaaccgacccgccttcgagattccttattccgaaatttcaaacaccaatttggctggaagaaatgaggtcgccgttgaatttgccctccctaccggcgacggaaacgatgccgtgacaaagcccggaagcacaaagaaccggggccgcaaggctgctgcaggccccgacgagctcgttgaaatgcgattctacattcccggaacggccgtaaagaacgacaaggcggaaggcgctgaaggcgaggaagaagataacgaggaagaggccgaggaacagaatgctgcaaatctcttctacgagacgcttatggacaaggccgagattggagacgttgccggcgatacctttgccaccttcctggatgttcttcacctcacgcccagaggtcgcttcgatattgacatgtacgaatcatccttccggttgcgcggaaagacatacgactacaagattcaatattcggccattaagaaattcttcctccttcctaagaatgacgatacccacactcttattgtgcttggtcttgatccccctctgcgacagggtcagacccgttatccttttttggttatgcagctgaagctggacgaagaaattagtcttgagatgaacatgacagagtcggtttccctgcacctactctattttacccactaacaaccttttagggatatcctgaaaggccagtacaaggacaggttgcaggcgcactatgaagagccaatccaccaagtcgtcaccaaggtcttccgtggcttatctggaaagaaggtcattatgccttccaaggatttctccaggtcagtaactgccagcttatatttgcaacacccccgaagcccgtcgctaacattcccatagccaccacggtcaccaaggcgttaagtgctcaatcaaggccaacgagggtctactgtatttcctggataagagtttgatgttcgttcctaagcccgcgacctacattcagatggagaacatcgcgattgtcacaatgtcacgtgtcggaggcgctgtttctgccagccgaactttcgacatcactgtgagcctgaaggggggcttaggtgagcaccaatttagcaacatcaaccggtaagtacccgacattttcctgtttcctggaatattctgacatgaacagcgaggagcaaaaatccctcgaggactttttcaaggccaagaacatccgcatcaagaacgagatggcagaagaggtatgtgaatcctgtttccctggtatgttgttaccgctgctaattatttcctaggctgctggacttatcgctgctgctcttgataatgatgccatgggctccagcgacgatgaagtacgacccgaccgcggatcagcagatgaggatgagtcgtcagttgacgaagactttgctggttcttcagaatctgatgtggccgaggaatttgactcggatcacgagagtagtggtgatagcgatgaagagatgggcgatgcctccgatggaggagacgacaaaccggaggatgagcgaccgaagaagaagacgaagacagctaattagatgtacggctaggtttttcgttttctttcaaaatatccaagtctcttctagtaatacaccattctataactataggatgttactccgtatgttcctgactagtggacctcacgtgagctggtgattggcggaccaattctggggcttgttaacccctgatctcaggagaagagatatctggcaagtacacaagtaagtatacatgtacatttatgtgagtggattctgagcagtcctcgccaatagaaatctccccttgctagtcagaaatagaaatgcagtccgattgcttagaactaaagtgcagttacgagcaatttgcgggtttctacaatgtaccgaagtaaacagagtagaaaagacccgaaatatagatcaaataggagcaattcaagcagataaatagaagaaagataaaaaaataatccaatatatgagagataccagtccaaagccagaatggtaagaattgtatacttatcgaacacatcaggtgtttctacgcgggtcgatccaagccaactccagaatagctgggctccccccgacaacctctcccccctttctttcccagactggcagagtcaacctccttctctccatcctccttgttcatctttcgcttcatttcttccttctcctcttcttttcttttcctcgtctctcgcttctggtcaatttactccaaccccccccccccttttnnnnnnnnnnnnnnnnnnnnnnnnnnnnnnnnnnnnnnnnnnnnnnnnnnnnnnnnnnnnnnnnnnnnnnnnnnnnnnnnnnnnnnnnnnnnnnnnnnnnnnnnnnnnnnnnnnnnnnnnnnnnnnnnnnnnnnnnnnnnnnnnnnnnnnnnnnnnnnnnnnnnnnnnnnnnnnnnnnnnnnnnnnnnnnnnnnnnnnnnnnnnnnnnnnnnnnnnnnnnnnnnnnnnnnnnnnnnnnnnnnnnnnnnnnnnnnnnnnnnnccacccccccccccccctttttttttggaaacaattccaggtacattccctctgctccccgattttttttcccctatcgcgacaattcgaccccactgaagattaggagaggtgactgacgacatttatcatctaggggatcttaattcagttttacatatcctaaatccccggctttcgcaatgtgtaagctatcccacccgtgatgagacagataatctcgaggctcttccaagacaagatactgataggtctttgaagcttcgccacctgcgagcagctcccccgtcgcgtctcccgtcgcatcgagggactctcctactcccaacaacggcacggagtcgcctttcgtcgagcgcagcaaccctatgggctctggtatcgcccagaccgtcagctcccgcgatcccaaggccgcagctcaggccgccaccgacatgaagaacgtggtccgccgcaagctgactggctacgtcggtttcgccaacctgcccaaccagtggcatcgcaagagtgtccgtaaaggcttcaacttcaatgtcatggttgtcggtaagttggacagataatatttccatggaccaagctcatatccatcaggtgaatctggtctcggaaagtccaccctcgtgaacaccctgttcaacacctcgctctaccccccgaaggagcggaccggtcctaatgccgatatcatccccaagaccgtgtctatccaatcgaccagcgccgacattgaagagaatggtgtgcgtctccgcctgagtgtgattgatacccccggattcggtgactttgtcaacaacgatgactcctggcgcccgattgtcgagaacatcgagcagcgatacgacacctacctggaggccgagaacaaggtcaaccgcagtaacattgtcgacaaccgcatccatgcgtgtgtctacttcatccagcctactggccactccctgaagcctctggatatcgaggtgatgcgccgcctgcacaccaaggtcaacttaatccccgtcattgccaaggccgataccttgaccgacgatgaggttgcccttttcaagcagcgtgtaagtttttgggattccctttctgaatcgattgaagctgtgcatactgactcttctagatccttgccgatatcgaacaacactccctccagatcttcgaaggcccccgctacgagcttgacgacgaggagaccattgctgagaaccaggagatcatgtccaaggttccctttgctgttgttggtgccaactccgaggtcaccactgctgacggtcgtcgtgttcgtggccgtagctacccctggggtatcatcgaggtcgacaacgaggagcactgtgactttgtcaagctgcgccagatgctgatccgtacccacatggaagaactcaaggagcacacgaacaacttcttgtacgagaactaccggtccgagaagctcacccttatgggtgttgcccaggaccccagcgtcttcaaggaggtcaaccctgccgtcaagcaggaggaggagcgtgccctgcacgagcagaagctggccaagatggaagccgaaatgaagatggtcttccagcagaaggtcgccgaaaaagaaagcaagctcaaacagagcgaagacgaactctatgcccgacatcgcgagatgaaggatcagctagatcgccagcgtggagaactcgaggagaagaagggtcgcctcgagactggacgtcccgtcgaagagaagggcaagcgaaagggcttctctcttcgctaatgtccatgtccctgccattgcttttgcttctgcctatacttttggcaactgatcctactctcgttccattttttcccttacacttgtcacccatcacactcccttaccatcccataacgcaactgcttactctggatgggtccacgcaccgaaaaaagaatgggggtttttcttcttaccgattgattgataatacgatcctgcgagggtcagcctgggacctttcacttcttgtgatgtactttttgctacgccatatcttgtcttgccgcttttctgtgtgccctattacccgctcatttcattattttcttagtgtttgggacatttggttgttcgccgcctgtccgtgtgttagtcaattcagcgcttttagctttagattttgcagttcgagtaaacagtaagcagcaacagtatcaagctaactaattaagaaggggaagagaatcggaaaataatctcaaggggtaagatgattctcctaataagattccttccgtttcctgagtttatattagttaggcccaagcagtaagcatacaatatattcaacctgaaatctcccagacctaggtgtcagatctggatgaaacaagtacaacattaataccttttctatcaagtataacatccttcaaagtccctacctctgttatgacccaaaatatatacctatggacctacaacctatatactacacctcctagtatagattatacagacatatcaactatgtcaattatgtcatctaatggaccgcaacggaactaatcatctagaacgtactccgtatgccccagaggcatgcgtagatcgtggagtctaattctatatttaagcgaaacaacacggggctctggagcatttctgcgacaaaacattgggacccgcttggtgatttagctcaacattgtacatagtattctaagactatattaatccatatcgaggtacctatacaatatagacgagtacattgtagataggtatggaaagaattgacattagggaatactttggtatcaaaagggacttcaaggggatgtgacttcacagacaataagggcagtgctaaatactatgtattttgtatgtatactccgtacatgatcgtcattaccggcaaattagtcgtacgacggagattccccttgcccttataattgtgaacagactattatacgcataaacctgaggatgtattggacctacaatcgaagcctcaattgcagccgttccctttccatcagtacttaatactattcttgtcaacaacatcaggacctttgatatcacacatccactgtctatagggctccactatttaaacgggaggctggcaatcgccctcctcattggttgttcgtgagctgtgaggtgcattagcgtggtggtccttgtatttttaatttgggaggtgtatggaggtgtaatttgaagtatcgccgtttcaatttcgaaaacaagctgggccttcccctgggttcccttcaccttcatattcagtcattcgttgttattcaaatgcagtgaggcttcagtctcgagcatgattcattcatttacattcctttgcttttaagctcttttttcccatgccacattccttatcaattttcttttctccacgcgttgcggcctgacggcctccctgaattccttagactgcacaaccctgtctagtcttcccacactcgcttcagccatttcagccatttcaactggccaactacactcctattgcccgtcgtcgctcccactacaatgaggatctcttcattgtttgggcccgcgacggccggctggccctcgctcctcgcgcttttaccgactctcaacgccctgtcattcgagtcagtctccatcccggaactggacctcagctcgctgggacgggtatcaatcactggtgatttcgatggcgtttctctctatcaatataaggaacagaccgaatcgattcccgatggcacccaaggtcttctgaccccgctaccgaacggcattctcacgaatctctcgtccaccaatgcgcatatcatggcaatgtgcccctttaccaaaaaggatggatctttcgcaggtatatttgttgggggtaacttcaccagcctaggcggagtagactcgcccggtgctgctctcttcgacccgaataccagcaaagttactgccttaccgggcctttcgggctcggtagcggccgtgacttgcgatcaggacactaaccgcgtctacattggaggaaaattcacccacgacaacacgacgaacgccatcgcgtgggcgcccgacaatggctggactaacctcccgttcaatggcctgaatggccctgtcagctcgattttgaaagctgacaacggccatatcatctttggaggatcattcgatgccctgggaaacagcacgagcaacagcacccgcaacagcaccagctcctcaaacgaaagacaaatcctcaaccttcaaaatgcgaccgtcacatccgatgcagactcttccttggacggctactccgatcctcgtaacatcatttgctcgacaaccggggtggcggccaaaggcaagacctatcttctacacgactatgcgccgggattttggagagcagacctcgggttcgacttttttccgactaaaattcgcctgtacaacactcacttagatggacgcggcaccaaggactttttacttcgagcgctccccgacactggcatcatgaatctgacttacatcgacgagtcaggaaaaaagaccagctgtgactcgtcctgcccgctttccagcagcacgaatgaaacctaccgtgaatttaccatggtaaatcccgttggtatgcgaggattccagattgaggtgcttagttggtacggacaaggagctggcctgaacggcattgaggtcttccaggaccaaatcctcacatacgctgtcgatcaatacaatgaaccaacatgctcaggcattgaataccccgccaagtcaacgcgcaccggctcttggactgtcgagtctgggtatgtgtctgcgaaggtgaccaactctaatgcctcgaccacatccgtcacatttgagcctgacgtgaaagagtctggcaactataccatcaagttatatactcccggctgtacccaggacaactcttgcagctcacggggtattgttaatgtcacggctacactcacgaatggatctgactctagccagcccgatccgtcatatttttaccagaccaacctacacgacaagtatgacacattctacactgggtatgttgatgccaacagtgactccttccgaccaaaggttacggtgcgggccaaggacggccaaggagatatcaccattgtggcgtctcgtgtccgttttgaactactttccagcaataagagcaccaaaagcaccaagagcactaagagcaccgggggtctcaatggattatacgattatgatccgaccgcaaacactactgaaacctcaaatcttacaaagtccgacattaacaaggcggggacttcactcgaccataacgcaaccatctcaataatgaaggagcatgatgatgtgatctatgtcgctggcaacttctctgacagcaagatccaccacgtcatgtcgatcacggatggcaatgtcacagcaatgcccggctctggtttgaactctccagtactagcaatggccacccttgacaatttcctgtatgttggaggtcgcttcaccgatacctcagacgcaggttcaacgggccttcaacacgttgcggcatactcatactcttccaaagaatggtcggccctgggagcagggctgaacggtcctgtcaattcgatttggcctgttggattgaatgcatcaactgctatcaatgaaaccatccttgctgtgagcggcgactttgaccagatcattgctttcaacgggaatcccgcggtatctgttgctgggttcgccatatgggtcccctcccgtaaggactggctccagaaccttaatgttacacagatgcagttcggtggtcaactctcaagtgtcgcttcgcacaacaatacactcatcttggcaggtgaccttgccaccaatggtatcatcgctggtggtgcggtgtcactgctaaatcccgatgatttgcaactgattcctctgtcgatgaagatcaaccacaaaaattcaagcactggtctgatcaccggtgcttatgataccagttcgaaccgcaatctcacgatctacggtggacatttcgctgccgctggcagcaatggatcaaccattgaaaatattgccatcctcaacggcaccgatgagaagatatcaggtctgccgcaaggcgtcgacagtaactcaacgtttatttcaatgcttgtgtacaacgacaccctctatgcaggtggaaatgttaccggaaacatcggtcgcaccagtctgcggggtcttgtggtttacgacctggaaaagaaagagttcgcacagactcagtcggctttctcgggctggaatgtctcagtcaatgctgtcgtcaatcgaccggattcatctgatatctactttggaggaaacttcgaaggtgtagggcagttcccatgtaattctgtctgctatgtggatgccaccaccggggaatgggatcaacctggctcgtccctaagtggtaccgtgattgaccttcactgggccagtcaaaagacgctgatggctgtgggcgaccttcaggtcggtggtaacaagacctcaattgctctctacaacgcgaaatccgaaacatggtcctctttctctggagcatccgagtcagatttgcccggaaatgtcactacgtttactgctgctagctcggatttgtcaaagttctggatcggaggtactgcggccaatggctcggccttcttcttgagctacgatggttccgagttcctatcccccggtaaccttttctccgagggcacggtcattcgtggtttagagattctccctgtcagccacgaccattctgcggctgctctgttgaataacgatcagactttgttgatcatgggttcgcttgtgatcccgaacttcggacatgcatcagcggcgctctacaacggaaccgatatcactccatttatcctttcccagcaagccgatggccgaccgggcagcatgtcgaagttcttatccgagaacaaaaacccttacactaccaccagtgagtttacttcacctttcgttcttgacaggaatcaatactgactttgacaacctagcaaaacatcactccaatggcatcgcagtcttggtggctttctgctgtgctctgggctgcgtcttcctcatcgtcctagccggtgtcatccttaataaggtacagcgccgccgccagggctacgcagctgcccctcaaaccttcggcaccgatcgaccatccgacatgcagcgcctgccgcctgagtatctcttcaactcgctgcaccatcccaaccctggtgccccggtcctttaatgccccttttcgctccaaaacccttgaccttcgaggccggcgtttcgtttcgtttttgttctgttctgttcttttctgttttgtttcgttttatcttaagcaacgttgctatacccaaccgtctttaatgtctgtgtttgttttcgcgccggccatatcgcgatttatcttcaaattcttttatttcctggctcctggcacatgtggccgatacagtttatcaaagctcctttgtgaatatgtctgtgttgatgtaccatatgctttccagcgatttatatcttacttgagtggatgtgtgttgctagggaggttggagatgtgtagatagccacgcttcgttcgtggacacgacaattaatacaatacccctttgctgatggaaatattctcaatagacatgtaactatagttattactatgctatgctaggtagcaatgtctaattatatccaaacgcataggcccattctcctttaatctacacctgagcacctgacttcgggagcacagcctgtctgagtcaggttatttgtgtgggggccccaggtcacctgttccctccccgcaggttgatctccaggttttcgtttccccaacccgatcactttctttatttcgcatgttgctaccgcatcgccttcatgtaatatcggtatgcgatcacgaaccggctggtaagtgcatatccaactagcgtgatacatggctaacacaacctagcttaacgtgtcgaacacgaaagcttaaatgtaggaatcggttctcccggccgtttcattgtctggtgactaaattaatttataggtgatgaagaaaagcccgaatgttcacaatgtcgcaaaggtggccgagaatgtcgcccgagcgaaggagtggttttccgccatcaacagaacgcctcgatgaaccggaactccccagacggtcggggtagtctcaacgggttctattcatataagaacacctttgacaaggatagcgtttggctggatgttcccaaacatggtacggcaccaatgggacatgttgtttgggtctggaccctttttggacggtagctcatatcctctgcagtgatctttgtcgacaactccgatccatacgccgacgacctcgaggcctcattactagacccgggcagcgcagcgcaaacaaactctccgaatcacagatgggacagtggaggccctcgagcgagcgatgccgagacacaggggttggaagccttgtcggcggtcgcaacacacgatcgcttcccttattctcccttggaccattcgatctctgatagtacctcctatacctccccaaacccgcagcggagtgctgctatcaccccggcttcaccctcaatatcgctgtcgtccaccagcaataataccaacattaatttcctcctcaaccccgcgcattcgatgtccccatccatcgacccaagtatgcagctatctgaccggaacaatgcgcttccatcaagaccggcagcttcacaaagaagcatgagccacatgagtcacatgagccttgtcaatcacacaacagacgacaattcagagaccgatttcgagaccgctttccttctgcggcattactcagaaggaccgggactgtggtatgtttccttccagctgttaacgtggaaccatcagtaataatgatatctgcaggatggatctctttgacctagggacatatttcgcttcatacgtcccagtgcgagcacgaaccaacccgctcttgaaattcgccgcctgtgcatattccgccaaacagctaggccgagtcaaaggtgccaaggcatcggtgggcggagtctgcacccagcagtctgccatggaactgtggcctgacagagaccccgacttcgcatggtatggggccaaatattatgaaaaggccatccagctgctaatgaaagagctgcaacctgacgcagagggtccacctcctttgagcacccctgaggctttcggtcaatggcaggctgccgagatttctgtagattcggataacccacgtaagcgccgcagacgggtttctgatagtcggctctcgcatggggttcattccgacgaggtgctcgcggcgacggccattctgtctgtttatgagttccttgatgccgcaggccccgcgtggaatcgtcatttgagtggcgtgaagtcgttgcttgatgtcgctgaagtgggcatgatgcctcttgagcagcgtccgtctccgggagagagctcatatcagacgcagacgcctaagaagtcgggtctttccaaggctcggaaggcaacgttttggaattttgcgcggcaggactacttagctgcctgtgagtgttgtctgtcgcttcccctcccctccaaacttcgctgacagaaaaaaagtcatcaacgaatgccatacacggctcaacacagacgatacagtcctctggaccgaagcagggttacttctcgacaacgcgggctttgtacgcgctagcaacacaagcgcagcaggatatccggaaggtgaagatgtaatgaaagaagacctaatcagcaacggactagtgtggatattgtccaagatagtcaatttcataagctctggcgacaacctgcacataagcggatccgtgccaggacccttgggcgtctcgcaacaagccctcctggagcggtggtacaggcttgaatccgagctcgacgcatggtacaccgggatcccagagacattccggccctgcgcccgaatcgacgcatccaatctcacacaccaccggccgcccgacgaacacgaagacatctccaccctccaggaaatctggtacagccttcccatgtgcgcctccgccatgcagcattaccacatggcgcgcatcctgcttctcatcaacaagccgcacgagtccactagccggcgcagcaccataacgctccgtctccagtcataccgctccatcgagtctgagatcgcattccacagccgtgagatcgtgggtatcggtctttctcgcccggatggaagcgtcaggatcaactcgctgcagccgctatttgttagcgggcagtgcctgacggacccgcgtgagcgccgcactaccgtgcgtctgctgaggagtattgagtcggatttaggctgggcgactgagtaccgtgtgcagcaattgctgaaggagtgggggtgggatgagaattcgacccgctcgcctggttcttcttgttcttgagacttgaagacaagacaaggtctccagcctaggaactagacatagtgtccgggttgaggtttggcgcgggctcaaccacgttcattgtatagtacccagtccctcttggtcggtcctgtattggagccgatgaaatcatccgagggtactggagtgaagtggtatttgcagatatctcggcttatgtcgaattgtggccatgcattccaatcttgtcaccaccacatgccatgctgagaatgacttgtcaaacgacaagcgactgggaattcccgtcactcattaggggatgtgccctctcacgtggtgtgacgaatgccagagacacgagtaatgattgtttatgatacccgtgtacctctgatagtaatcatagtatagtacaggtgactctcacactgcaacataggcagtatagccatagagtggacagatggattctaaagaaaaagaaaaccagaaatctcgttagatttagggtcgagagcctttccttgtttgattctgcaagttcggtttagttgcctttggaagacactaaacgtggtatacatattatcataacccaggcgtgttcatttgagattatatactctatattacttacatgattgttctctagctctaactaatctaattacgaaaaaaaaataaacacccattaacttactatttaactaacaccccaatctccaacaccaaccataaacccatccagccctaatccaaaccccaacctcaacgctgcaggttttccgttgaccatggtgtcaccgaatccacttccccccaccgatttacccttcttaggttccgggggggcaacttatccgaaccaggacaccccagatccgacattattcaggatctactccgtacgtgcaggaatatatcgggttactagtatcggctattccgtgcataattcatgatgggtaggattctggggattgggtcggaatacaacatacaacatacaacttagagactagagaatggaaagttgagcgttgcagaatggggtagaaagaggtatttatagcggatttatgttggtcgctgtgggcgagttggagatttagttgagacattttgtaagcttgaatattacgagcttacttggacttgggtttgcggtgagcccagacttcatctattatttagaatttcgagcgctgcggtagcaatgtaagcgcaaattcaacagagataaatttgagcttgtatgtttgatttttgtcaagtggttgggtggtttacttctacttatttaggttgggaagaatacgaagtgggggatcaggagatatttcttcttgctttggttaatggtagcaatcacctagcctctttgtatttcggcaaaatgaggataatctctagcgtgaagactattctgacctgtgggttctttttctgtcttttcttcggtttcaccacgagccagtgggtcgatgcggacgggaaaagcagcgagtcagattgagcttcgagctaggactcaactacgccaaaggccgaaatcacgtatacaaaagaaccctggtaaaaccaaggtggcaagaactacaggtggagttctgtgatttgatgtgggctatgcttgagcgaggtgttgtatatcactcataagtggatgatcgtgagaaagcgcgaaagaccaagatgcaaaggtgttttctgactggcttaacggtcgggggtccgtgaatagcgctaagtgtgatgatgacaagaggacgccggtgtgatttgagctagaaccagctactttgtccgtgcatatcatgaacgtatttccgcaggatgtagatcatagactatatatgtctagtgaaagtgaataagcctgctaatctatccttaaataagatctacaggagggtcgggatatgaacgggttagcgtgggattcgagagttttacaaagtactccgatgcatttcaatcacctcgttaagcacttcattgtgatagatcggctggctgcatacagagtacagaaatatcatgcggtggtctcttagcatccgattggactcatgtacgacgaatgccggtagtgatcacagcgggagatgcgttagtcgtaatgattgggtggattaacgcgtgggctctcggggaggaatgctattgttggtgagactgaccactctggcccctctgacccctcggtgctacatacaatagacagactttgatgtccaggggtaaaaaggcaatcgaatcaggatgaagaggggagtggttggacatgggttcttgagctcagctccgcaatttgcatagttgtgtatttcattcaacattagcattgtcttattgttttattatattagttattatatatgggatattatagctcactaagactaaataataagacgatatcccgactgttcttgtattgtcactgtattttatccccgctaaaccaccgtgccaagaccgaattgagtttgcgaggaccgtgggtcgacttggtcctaccgggtaaatgtgattgcaagggtttatgtattgtattattatagttagttactagctaaacactattagcacactgcatatggtcacatcccggctagactttgagagaacccttctagactattgctggatgcgtcgggtggaaactcctcgcgtgcgctgctgccaagggtccgggattacatgtgggattcttttattccaactttggaaggttgtagctatatagcggatttcctctgccacttcttgacgtcccctttccgttttagtgctcagaccttgccgctttttgctcagagtacaactgagcacgcccctgagcggtctgatccgctcactgagcattacataagcacccagatctgctcacgtgcagccctccatttttagatggcacccatcgtcccatcaatgtgatcttcaatcctggtaaaatgactgcaattatttgcataatggagcttgccatttggacacccaataagcactaccatgaatccatacgggatcacctcaagcagaatcatagtactattattgattgcattctcccctcttcaggagtccgggtcgctgaagctgggtcatttaagtctttttcaggtagagccggtggactttcgatgatcattgagaactgacgtatattcaaggtgacgtgatcatgtcttgcaagtgcaagtggaaatgtatgtatagtatacgtacatatcaaaacccaccctctgcgtccagtcaccacatcgaggccgttttcctctgccgttgaagtttgagtttgagtgaagaattttcctccgcaattttcttaagtacagcaatggttatatctggtatatctgtcataatcaccatactttcatcgtaggcgaggaactcctgcgcatcgcatgagattgacttaattatggcgtctcgaatctcgctctcaagaggcggaatggtgatccagatttgttgcacaatcaatggaaatccccttgcgttttcggagatccaattcataattcgagatctcgcaaggattttcagtcgcgaaatgtcaaacttgtcggccgccatgaacactccgaggttgttccacatagctgcatgaggttccataccattaccagaagcgcacttccgattttgaaagtacgagccatctgtgtcttcgtagtcttggtggtatagaaaagagacaacccgttgaatagttgcaagctcatcatctggcagatcaacatgtgatagcgaggcttccttgtaaaaaagttagccatatgcagcgatcacggcaaaggcttgtcgcattactctgaatcctcctttgactgcagcgtcaaaaaagggtgattgtgaacagactatcgcacgatgtacctggaacttctgtccttcgcatgatatcgccaggtctgagtatctacctgaatccagaaggctttgcaagattggttggagatctggaaaccccatgattgatgtagctacatgtaggccaagttcaactcgattctagcatatatcaattctactctatcattgaagactatgacgtcaacactaagatcgtttgctgaggagtgggtcatcctgaaattagcttgaacacacttgatcatctctagacccaccgctaagatctatcattgagggtcggtctcagaaagtcagaaggacgcaccatgtatagctctgtatcttactacatcgtgttaggtccccgccgttaagctctatttgttgaatgtaccgtacgagcggcacattacgatatctctcaagttaatgcgtgtttacggcggcttttaactggaccaaggggtgcacagacaccggcggtctgatagagcaattttgttcagttataaaggtgcaactgattgggttgtgcgtcttactttctacatctgccttttcagaaagtaatttgcctttctccctcgaatcactacgatgtgagtgattatttgctgttggcatatctcaacaattgacactgcatagtgcgttccagaatgccgactctgccaatcgttaacatggaactgcagtttctggagatgagagagacctacgaagactcaggttgtgggttccagttcgcagggactctcgttgtgtatcaggtgcagggccttttgtaccatgcaaagctgaaaggccgttgctcttctccttcgattgtcaatgcagaggaccttatgaacgttaagcaaattcctgcgtcggcctacgatcccaaatttcctgtcggatttacgctatcgcctggatccctacctaacggttgtcatgtcaaaaaaccccgattgatcaattgcgatcggattagtgaaggacctcaaccgaatttgattgcagaagatatcctcagggaagcaaggatttacgaactcttaacgttacacccacatcctaacattgctacctacctcggttgccaagtttctgacggcacaatcacgggactttgccttaagaaataccctcataccttgatgaaagaagtcaacccgggcgctctcaaaaagagagcacttagaaacatgcggaaagcgaagggggaatacagtcatttcctcacgggcattgaaaatggcatccagcaccttcactcgttggggttggttcataacgatatcaatccaagcaacataatgatcgatgaggatagagcaatcatcatcgattttggatcttgccggaagctaggagagagcttagaaaatgtgggccgtacctacgaatggtgcgatgacaaagttagaagtctcttctagagaatgacttgaacgccttggaagaaattcgcatttggcttggcgttagttcacaagaattccaatttgatgaatagttcaattcatttgaaaatctgagccattcttcggatccaatggggaggtctcgatcaatatgcctggctgttgagaaggctgctaaagatactatctttccggccagcaagtttcccgggcccatccatctctatcacctttccctgatctagaacgaggactaaatcatgatccatgagcgtatggacacggtgtgccacagtaagagccgtgcatgaatgaaacggctcgcgtcgcagaagagcctgaacatgagcgtccgtttccatgtcgacaccgctagttgcttcatcgatcagcaggatcttggcgttgctcgcctgtatcttcagtattgcacgggcaagctccagcaattgttgttggcctctcgatagagataaagtattagttatctcagcttccagtccacccctgtcatccaacacgcccttccaaatccctactcggtctagggccgcgatgatatctgcatcggggaactttcctgtggggtctgtgttcaacctgactgtacagcccaccataatgaatggatcctgaggaatggtgacgatcctttctctgaccctttcaggttggagggtggcaagatcgacgttgtcgatcagaattgatccattcgtgatagtgagtatgcccaaaattgcggataatagggagctctttccactaatttctcatgacggaagggtcaggccagatcctcaatatttcaccgggtagattacgcagagctgaaacttacctcccagtgcgcccacaaatgccgatcttctgaccaggagaggccacgagagagacactcttcaaagcaatagctttcggactgttcaatctcagtttagtgacctgggtgaaatatactcatttgtctgtgaagttcttactggtactgtgcactaacttccgagacgtgaattgcgccccgatctggccaatcgctaggtggttccgtttttccgcttgtgacttcgctgggaacctccatttcaaaatctttgactcgtgagattgaaccaagtgatatctcaagttgtgtccagcccgatattaaagatgagagacttccgttgaatgctaacgatgtttagtcagacaggcaaagacgataggttgaagcatttgatagaagaatgaagagaatggagaacagtttcatggtcagacatgacttacagaggatgctgtttagtgaaactccgagtaatcccacactagtcttctgcctcaaaaataccgctaggctaacgacaataatcgcttctgcggcaacaatcagatccaggaccagattcagccaacgttggatgcaatttagcatatagtatgtgcgttgggtgacatctaatagtcttgagttcttgttctggaagtcttcttcccacccaaatgcttgaattgtagcaaggccctcgactgtatcaaggaaatgagagtacagtgggcttctgctttcgaggtccagaagtcggagctgtcgtgatgtttttagataaacatgctgtagcaaaaagacagcaaatatcaagaaagggagggagatagccatgtattccgatcccgtagcaatgagtgcagcgctagcaattgatgagaaaagatctttaatcataagcatgcatatctctaaagttaaaggtgcccatgataatcgatagatctcatagcgagatcaaggtagggatgggacaagtcgtgaaagatttagggaagcgagacttacttgaaactgtgatcaacacgccgataggcaattgactttctacgagggtcatgtcttggctgaatcggttcaatattgacccattgtcaactgttgaaaggaactgcggtgtcgcccttcagagatcatcagcagacgaagacccgaaaagatagaatcatcatacctaataacggtcctcagcacgacatagtgaaggcggcgtgccgttgcgggcgaaattaggatcaagatagcccttttaagtcgtaagcaattggttgtttatgactgggctctatggagacctcttaacataccaaacgtagccaccattcccgatagtgttgcaaatcgcgaggaggaagtatattgtgacatataacggcttttgacctccgccgcggttagcccaccgctcaagccagatctctatgtgcaaagcaatgtcagtggacatgcaaggagtagtggaatatgaagtttcacgtactgccgtatgtactggcgaagacattgatagtcacgaaggaaacaaaaatcatggccttcgtccagccgatgtagcgcaaatagtacctataaacagccgagtctcccgttgctcttctgagatcattaatatcattcgctttagagatctcggctgctttctctttcatcatcgactttgtactttcctccaagccctcatctgctgcagcatcgggtagcagagcttggtagacggttctctcgcgggcctcttcccggcgaagattcccgtccgaaagagccagaacttgatccgcataagatagataatcaactgtcgagtggtcagtgcacaacactagggatttgcggcatcggggctgttaaagggagccctactctcatgagtcaccatcacaacggtcgacattgttcttcgcagaagtccgtcacctccgaagagacgctccattatgatggcctttgttttccggtctagtgcactgagtacatcatctaacaacaaaagtttcctacgggcatacacagcccgtgcaagggcaattcgatgcatttgaccgccgctgaacttattcccggatccattgccgatttgcgtggcatcaccctcaggaaacaattccaggtctggaagcagagcacatgcatgaagaacgtccgcataccattcacagtcaataccgtgagtggttactgatcctgtagcagttaccccgcaaattgcttctcggatggtgcccctcgggatccaggggatttgcgcgcaaagggtcgggtttttgatttttactgtagttacccctttctcgcaaactgcttggctaagtatagcccgaagcagagttgttttcccggatcccactggtccccgaatgattactagatttccagctggaacttggatgctgatatcccgcagtactatctttgccgatggaactgggcggatattgactcgttccataaatatgacggggaatgtaggatcagcagtgccgctgctcaagaatgatatgggttgcagctcaccagagctatcgctcatgtgaatgtgagtttcttccgtggtaatagaagttgtatctgggtgatgctgaccagtcggcaccatgagaaatgattggattctatcaaagcatcccgtagcggccgccgtggaaggaaccgcactaagcagcttagaggccgggctagtgagaagtgttataattgacagactgctgagggtcttgctaacatcaagttcctttccttgagcagcgtagactgtgaaggtcaaagctggtgccaatgcccatggtagattctggattatgttttgccaaacgatgctccatcgatatttggccatttgatgagtttcttggactcgtttgttctgtatgatatgaagaaaggtcttactcaaccccatccgcttaacagtttggatatcagccagcattgaacgggtgattgcgatgcgctgctgaacagcatcaacccaatttttctgctgcccaccaatattcttcgagatatatgtgctccctaggctagatactatgcaaaattatcagcaaccggtagcgtgatgtgaagtgattgggatacccacggatcacgataatcaatggcatcagacaaacccatcccatacgaagagcaagcagcgaaatgccaatcgcgacctcaatagtacgagcccagcattcattcaaagtcactaggcaatcgataatccggtcaatgtcggtggtcatgagagtaattgtggccgaacgatcctctagtgccccatcggggatgcgcaacgcatggtcatagatcatcgacgaagcggcccctcggaaaattgtcgtgaaccgatttagcatgtggttatacgacagtgtagaaagagccatgcccaggtatatgagaatagtggcgccgataagaccgtagccgtcgttcaacgcggtagatggatcatcaagccagttaagcatggaagtgatcaggaagggttgcgcaaaagtaaatcctatcaaacacagtcgaggaaataccactagtgccagtgaggccctgagagcccgacacatctgcactgggaattcgaagcggcgtgccgggtgctggcgttggatccaagcttgccgcgccttctcggccgcgcccgcagattccagaggcttatccagaacatccagatcccccacagtgagcaaagatcgaaaaccagcatggaaaagacggttcaaccaccacagaaaggaccggttcaagataccactcgttgactctggtggcagatcacgatacgtaccagtgaggtacttctgcttccccagactctccagaagaagcatcgtcatctttgcagcaacactggccgtaaatagactgggaatgagacttccagtgcgggataaccagagagttctggtctgcacaatgtcgaagagtagcgtgaggacaagatagatggcgaggagtgatgacggcctgactgatcgctcatcctccatccacgatatgactaaaatctccaatgccactgcaagattgatcgcgccagatgccacggagatatatgtaaaaggcttagcattctgtgcccagctaatgagcagggcgagttggattgcggcaaacacgacgatagttatctgtgctatgatatgagttggacctccaaggtaaaggtgtggaagttctcaccagttttgcagatctcaatttgttaaactggattcggacatcgcatttcgcgagaatatgtagtcgaacaggagaaatgatgagaaacgcgaccgcagggacgaggccgaatatcgcttgctcgaacagaagggtgaaatcaaagccatcgcgacacccaggattcgtcacggggccgaaactattgtccgcctcaagcgggcaccctaaaggtatcatgctgtgtctatctctctaaatcgcatgaaaaaggagagggaaagatgagaagttgacttttgaatgagctagtaagctcctgccgcgtgatcgagggccttatcagatatgtttctccgtactctgtacatacggcgaaaatgatttaattggctgggtactttggtttaatttgttttgttttcgcagatctccaaggctattcaaaatattggtttcgaaaactacgtaaactaaaagatggccgacgtaaccaactatagaatctcatgccttgaaagttgacaccttcgtttgaaatcagtgtcagcttggcatgcctgtaatttatctctttttgcatcaaaggacgggctacggcttcttcggcgatacccgtttatgctgcagatcgacgctacttacaagacgtgttctactaaacagataaattaaaggcatgccaaatttacaatttttcttcctccgccggaagggtctcattgccgcggtagaaatgccagtccattctctgcaggaacttggtgactaggtcagcgaggtagcattcagggcgctgccaggcccacggcatggaatcgaaaatgcctctctgatggatctgctacagctaccgaactcatccccagtcgctggactcgaaggaggacgtgaacttcccgtttccaacttctctcgcatggctgcaatttcgtcacttgccctgcgagtgatacctccgacggacgagagcgtagcaaagttgatgcttccaagtatgaatgagagaatattaaatagaaataggacgccagtgcggacgaggaagcggttttggagccgggtccccatcgatccgtccttcgtctcgttccgggcatttatcgtccacgccatttaaaaggggtcatattgatccaggctgtcattcccaatgctcgagaatgctgctcctgaaaaatgacaggctttggcagtccctcgttgttcaaaatttccgatgtagtttggtaccgagcatttttgtgtagtcggatgagaagaaaaccttaaagactggagcacaagaaaagtacgaggggcgagctcagctcccgaggggaagacaacacagatgtctcaactatccacgcatagtctgtgacccaagatgggaccgggtatccgtatacagaaatcggatgggtcgcgatgaaatcaacgaggctattggccagcctcctatcgaaataagaagcttgttcttattaccgcttccccactattgcttatgttccagcactgctcgcttaaattcgagagcctagagccctacaccggagtccccacgggcgtccgttgatagcccggccccacacatacgatccctgcctgatactacctaggttaatggattatatatatttttcgtaggtatcttaccctactaagcccttgtatcaaaggtcttattgctataaaacccaactttataaagattataaaggataaaatacttatagagttaagtttagtgttaacttattagggatcgtgtaacttcccggggaaccgtgtggggccgggctatcaaccgacgcccgtggggactccggtgtagggctctaggctcaagcgtgcagtgctggaacataagcaatagtgggaaagcggtaataagaagaagcttcttatttcgataggaggctggccaatagcttcgttgattctggcacacctttccaagggttccaagtcactccactgaaagctttcaatcggttgaaaaaagtaactaatgttgtgatgagtggctttattgtatttgatcgtcaacatatatgcaaaacacttctcattattcattgtatagagggaaaattgagaggtttcagtacgctatctgttttacctcgcccgctatcaagtacaggagtgggtccaaacaaactcaaaattatgggacttacatgaaatcgatgggccagcgagggcgggactaggcagctggaactatcggaaagtttccatgggggatctcttgttgcctaacatgcttagctacttctgtaatgagtgagcatgatgtgtacgtgtcccttttgaagtagaactcgggcgtactgttctatggagtacatccttgcgctccctgtcaggctaaaccaccaatttatctttacgcgattcccgcagttacggcattatttcatcataatacggagtacaatatttctattttctataatccattatccggacttcccaccagaaagtaatatcggacatgagattgagtccttccggccccgtcgtgaagtactaccccaatgcgggatcagttgacaacggctattcagctccttttgtgagaaataatcctcgtagactgagaaaggcattctttctgattcgagctatacatcttagatctttattaaagcgtggcacatggattgattatgtacctagtatgtagctaggaatataaggataccaagataattatattgtcactttgttctcaaatgatgttgtctatatacgataatagatacaaatagtgggcgaacaaaatatacaaacaaatgaataccctccctatctcccgtagcttgacaagacttcacgccacgccaccatttccttaactgtagactaatggtttctgaatgttcctaggccttgtcgacatatcaagcggcaatgtcatgatcctgggctttatgataaccatgaacctccatgaactccctgactgcggtctaaacagtatctcagcattccataaattggagtatggccatgtgcatctgcagcagacttaccttgcttgtgcaaacatgagggatgcccttcccgtctacttggtatcgtcttccatcttcctctgttcttggccactccacggtcatgtcggcaggacattcgaatgcttgcctcagatagtcaaaacagtggccggtgtgctcattttgaatttgtttattcgcttgatccctcatcgtcgcaggatcatccacctttttgttttcacggtttataccacaatatttttccttctatgggataactcacctccaacatgtccatcgacaaagggccatgagtttctccttgacacttacagtcagtatggtcccatgggtttgaaaaaatcttgctaaagagaaaatctaggtcctgcgcgggaggcactgaagtgggaaccgaggacgtttgaaaaccagcttgagatatcaaatccatttaaaggaccacccagaccagaattagaggaggcatggcacaaacttctaaatccggccgctgctattcgtgtggataaagaagtactcgaccgaattaaccggacttctgttgctctccaagacggatcgggctatatggttggtctggatgtctatcatcaactgcattgcctggtccgtattcacaccagtgccattaggtatatcggcttctgaatcctgtactgagaagtgaacgcacagagatatatccgcagatacctccaccgggagcactacaatatgacagaggaaaacctgggtcagcatatcggtaagccttgtcactatatccatcttaatgtgagctaataccctcgaagaccattgtttggatggcttacgacagtatatcatgtgtaacgtggatgtggttctcaacacctttgactggattcccaactttcctagaccgtggccaaacttccaggttgtgcatgagtgcgtgaactgggaggccatcgaagactggaccttggcgcacagctttaatggatttgatcctgatttaatcaaacatacagatttccatcctgagctacgtaagaaatacacctaagactggagaagtggaagagacactgactgatattgatttcacttcagcgagcccattcaattacactctgagcgggaacgagccctaagatggccgggtattttgtgaaaggtataactagtccgagttagaaattgcccaaatgtatttttcccagataaattaaatgtttgagacatatctatcagccgcaagttgtattcgctcagtcgaccaggccaacacaaatccgagtcccggtaagatggtattgacagcactttgaaattcttgacagatggtaaaagcttctcattttgactgtattatttcccaatcctctaattgaaggccagtgtaaataatcttcctaagccttgcaagttcctgggggatcattgactggcgtctttaatgagagggtggggcgaagccgatatgagtccaaaagaaacagtcgaacttccttgttggcggcaatcacgtactttgtgcccaaactggccgcacgaattacatctaagaatggtccgccgccagttctgacatgtcgtaatattgttcgtctgtgactggtctatagtcgatagtcgtggtgtccgtatcttctagtatcggtgattccgggactcgttgtccgctggatgaccgtacgaataaacgtcgtataatacgtcgggttgtaataaggatctatattttccgtttgttgtgacaacagattcgctatgtctgggacgtcgtatgcgtttcctggctttcctagtctctttgctaggtctcgtcgattatgtcgttcttctacaaaaggctcctttcctgcgctttatcgtcgcttactcatcaggcgtgttctgttagttactcaagtgggtgatcaaaagtggctaggcgctctctgcaacctgttgtcggatatgaaaaatcgtgatctgttcaagttgttttcggacaaatcccgtcgcgtgcgcacatacaaacaactaatgtgtcgtaatgcattagcggaattccccaaaatccttctgcagactaagaaaatgtctcagaagaagagtcaatagcctagaaacagcctagatacatgtagaatccctctcggtttcaaccgcctcttagactccgccaagtggcaatcttcctgcatccgcaagtctggcgagtcatatacacatcaccagttgggagattaagacagatttggttaggaagccccgttggaagccgacggggagtagctagttcttgatgttgcattggcaattgcatatgatggtcgatacataatatttgtcagaaagccgatttagcagatcattaatagtcgtactagtaaacatggtaaattagatgaaattacctcggaccatgaatcctatcccctcccagtcagatacctatataaacatcataccaatcctcgaaattcgagattagagttggaaatcgtctaatacgacttcaagaaaatataccatctgatttgcttctgaagatcaaccttgaattagaatttcaacatgcgcttcacctgctttgtgttggctttgccattcctgtcaattgccgcacccatgagtggtattacctccatcctatgaattgatattttctatttcctaacgtctatgatagctggctttgaaactcgaggcttggaaggaactgaggagaatggacaccaatcctacaagagagatgttgctggcgccgaggagaacggacaccaatcctacaagagagaggtctctgcggcctaagagcacccacgcgtacgtgctggcctcatcagcgaaatatgcgtcttctttactagacggccataagtataagcgggctttatgtacttcacatatgcacacattttagctcatcctttcctcgctctgtacgagtagcacagtcaggatcatctgcgtagtagctctagatatatgttatgaagcctttatgtttaggttagaactctttgtcgatgatcttgtgccgattagctttatctagcacctttagacgcctggccagaaagatgtaaatactgcagtaggggtttctagagtaagataactgagcggtcatatgatctatagttagttagctaactagtgaagagggaaatgcacgatgggtaagtatccgggccatataggtaagataagaacaatataataatactaactaactatctaggacggttagctagtaagtatagggattatatagactatactatagtatataatctcctagtatataaatatcttataacttacttcttatttctagggtaataatctagttaggctctctctttctaaaactctacttaataactagttaggcactcacttttctctgcctaaaggataaggctactaaactagggattctgactttctctactatattagttaacaaatatacttagttaccccttaactccctttatattaccttatatagttactctaacttatatctcgtctacctaagaagcgtccctttcttatcatacctctctagctatacctttatccttacatcctatggcaggaagatgggtctccctgccttattaattgggcatctgccggctagttactatccaaggttgtttgagttctgcgtgcagtggattactgaaggaaaggacggtaaatttaattctcttctcttggggtcgatgaatcctttgtccagtccagagatggcgcaaaaagagtccattatgcgtgcttggagaaatatccagaagtatcctttgtgagcacatgagactccagttatttattgattgaaactcacctacttccatccagtcagaccaaaaaatccaaaaagtccaaatcatgccaaagagcatcaggagaacttctccctgttccccctccttcgatgccagaatacccaccagattggcatgaacaagataggcttctatcataggtattttgacgtttcctttttgaatatgccctataaaaaccgaataaatttccatgttaacctttctttctcattctcactaatcccaccctgctaatctacatctggaaagtatatgacatgagcgaggagtagtcttaaccttggtgccctctttgagcccccaaagagaggccaatatcaaaccgccgcatatttctcgtatcaaaatcgatgatagagcaagccacaaacacattcttcagatgtcaacaaaacaagcagtctacacccatgacaatatctaaacagaaaatgtcaaacacaatgtccatctacaggccaccagcagagcaaatcttcttagactcagggacacgctcctggtaccgactcgggtacgcggagccctgtaccttctggcaaagtttgccagtattcattttcttccagccactgactttcttcatgatcttgaagaactgcgcggccgactttgcagcatccatatcagcagcgatgttggggtagtaaacagcccgctgctggaagatgcccacgctgtcgtagtcctcagccacagcatcatggtgatacttgagagaagcggggaccttcttgttggcgtaaataagaatgttagacttgaggtagtgttagcaagcttctgtgttgttatatttcaattgaatgtgtatgttaagactcacctcaacaagagcggttgaaattccagcgagacagccctgacgacccaggccctctttcttggcctctgcgatgatggcctttgcgtgcttggtctgggtggccgagagaccgggcagattgctgctggtgctgcgctcgctgagggcgccttcgctcagggtgtcttcgtcatcgacagtgtcttcgctggggcattcctcggtgacatcgctggagaagtcggaaacatagcagtcgtcgacggtttggtgccagatgtcgctgccatcgacggtagtgccggtggcctggcagacgatttcaatgtcagctctctcctcgtaggtcttgactacagagtgagaggctcctggaccagagtggcagtcgatgacgctgccagtgaccgggtaggcattgacaattggcgtgagagcgacaaatgcgagtgcaagaatgggagtgaacaccattttgaatgagctttggggttatacttgagtatattgagaagttgaagctggtattgaagaatgaagactagccgatgttgcgatcttgtgagctgatggatagaggagcttgaaggggaggcaatgagcatttcatatctctgggatcctcaatttctcgagatcgtatactacatcaatcaattactttgtacattgttgcatgcttcggacccttgtttgccagattgatcccgtgctcttgccccacgaagctcgtatagaagtggaatctagagagatcttcattgtttttttcccacaaagcccgtatccctagtcgaggttgcatcaagcgagattaatgaatctatattcaggaaggccatcccgtataaaccctatagggagttcccgtgttattcaaacgtccgatgttcgaaagcttaatcacctgtcagggcacaacgtgcacgcctaaaaatagcagggcttatacgggtactagggtcgattggtgtagatcaccgtattcaaactatgcacttcaactgattcgccagtcatgttcggggcagatttagtgcgtgctacatcggagagatgcgctgaagtatctcgtttcatctatagtatagaagtaatttccgaacgcgggaagggttcgacaaatatgggtttacccttgttttgcgacaagcctttgtagtgcatattaagcatcggctattgtaacccttatttatgtggtaattgcaactcatgtaccgggtactacgtcggtcatggggaccggactgaaggaataacgagattgggctgggtgcatgctaccaaggtctcgtaatgtatttcacaagcgagtaggccttcgagacatagcaaatacgatgaattgcaacacgatcttacaacaatggttatttagaatatactcttatggaatctaatcactatcgtgggtttcgggaaattcaacaaaatagtgggatgtatatatttctaaagtccagtgatatttgcgatactatgacaatgcagttctctgaattatttgaaattgagatatgttagttaccagaaatgtttatcaataactaaataccaacagcattggctgttgacatgtctcgtggtccagctcgctttgagatacgttatgatcttgttacttcttagctcagatcggtctaaatatagtattggaggaatccaacctctgaagagtattccaaacaaagactaaacgtcagaaagtgcatgtttgcctagcttctgcaacgtgcttcaatttataaggtgtgacaagttggcttgaccttgtcgaggatcacgagtctcaatggatactgttttggataaatgagcgagtcaagtcattgtccactatccaccctggttagtacggcgtagctgaatcaaccctaaggctgtgagagttatggctcttctacccgattctattgtcaatatttccagaagagctccgatcaagcttgatatatatatcaattctgcccaagcccctttgcattgacatttattcaccaaaatgtgtgacctatcaaaatataactaattatacatgaactattgaagaatcctggcgttagtgctaaaactggatctcctcaagcgggtcagtcacaccgactggactcgaggctgagacaaagcgagaagttcaaatgagcaaaaaataagtataataagtcgagaagtatatacaatcgaagtgaagaggctctatagatgtatagataaggaattgcatcatcccgaatccccgacgtcactacggcagaaggcggagagagagaagaggcgaagctgaggcgtgtgtgtccacggctgtgaacctgtgcacttggtctccccgctctctccccagccaccgtcttatctgtcgctttccaccttttttttgcttctgccttctccttcatctcgagtaattttatcaccctcttcatctgtggaaaaaacaagatatggctcctcctccttccgccaccttgcctctggttgagagactcaaggccttggcgcagaccctacagtacgtttctccagtccaaggctgaaatgaagcttcaatgccttgtttatccatactaacgagatgtcacgttgcaggtttgcctggttcgttgggtaggtcaatctgaagcgcacaccgacaaagatccaagttcaggcccactaacaatttttagacatgtgacacttttgctctcagtcttccgctactccctgtcttgcatcttcttcaactactactcctccgcggcacagatcgcctaccgtttgaccttcatctcggccgctgtgacttatggaatcgtcgtgtacaagggccacttcgcccgaggtgtccaaggcagccctctggcaattgtgttgaagctcatctctgatgagaatgtgcaataccttggtaagtgatcagctatgcgacagcccaaacctcaagcttacacgtattctagggatggctctggtctggctgtactcgcgccagctcatcctggctcttctgcctttcagcgtctactcggtcttccacgtcgcaacctacagccgcatgtacttaatccctaccctgcagcccgctgctccggccgcccctgcctctcccacctctcctacctccaagcccgctgtcaagcagtctcccctcgccgagaccattggacggttcatcaagcagtactacgatgctagcatgggtgttgtcgcaaccctcgagatcgccctgctgttccgacttgctctgtccgctatcactttctccaagggtagctgggtcctcttggtaatctacctgtctttcttccgcgcccgctatgcgcagagctccttcgtccagcaagctgtccgccagcttactgcccgtgccgatgccactatctcccaccagagcactcctccccaggttcgccagggctgggaggccatcaagggtattgtgcgtcagggttacgagatcaccgatattggccgctacatctctggccctaccgctgctaagaagccgcagtaaatctcgatatggtatgccagacaccttgctttgcatgctggagctcatgacatcaggaaataacatgggtttttggtttgcaatgttgctgagtcaaggtggctggtgcaaataatattacagctgtatctttcccataggcatgttcccgcctgagcaaaggacaagaaggatgtcggagtgtgggacgcccaggtcccgactgtagaaaagaaggacgcggaggattcctgccatgatgatgctatacgcaatgacttgtgtttattatttctagagtattgcgatgcatagtctgtatttgctctcctcttgtcaacataccttgtttcggattcatttcattattccaatcacggagagtcgtaaagatccgaaatctagtacaaagggtgggagggcttctaggcaggagggctgcaacggaacaagcgctcaacgtccttcaggacagtttataatcgatcaatctggtctagacaaagaagatatcagagatagacagttttcccgagatatatttgcccgaatcaaagtaggttagtgcttagttatactagactcgaggggctcttactcaaccccgctgatcatcaggtttctttcataaaatggcctagcggtaactgaaactaaagaagccccaagccctgtgaaattagctggttttactagcattggacaagctctatgcataagtttattaacaatgagcatgcaattacggagatatatagttgtgtggaggatatcaaggacaatcaagaagctcatttgcggcttgtagcagttgactattttagtcctcacacatatagaaaaaaacctctccgatcaaatatacatagttgttcatgccatatgctgtttttagatcgtatctctctcgaaatatcgaatgactccaatgacagaatcccgtgattcgtgcctgaggcgaccgacttatcgggcttggcggcgaaaagaagccgatcagaattttggctggcggaacaatcatcttgcaaacaatactaatcaatcctttcccggtctcttgtcactctttcctattatccttacctcccaggggtgctcctctcccgctcaatacctcagcccctcagcacccccatatcccagtctggtcccgaccagtaccatcgggatcccaatttagcataatattgccatgagcctgacctcgcgagtgttcggcctgttctcgacagcgacttcggactcaacagcaccgcctgcgggggactcgaatacctcgacatggacacagcagacgccagtgggtggaaccgatgattcaaccttcactgctcgaaatggcgacctcgcgctgttggaggacgaggaacctcggccgccatacttacatgtacaattgcccctagcggcatcatatcattgcccaaggactgacctgatttgaaattataggcgatgttggccggtggtaccggaggaacatgtggcgacatgttgatgcactcattagacacagtcaagactcgacaacaaggcgatccgacctttccgcctaaatacacttccatgggccagtcctattcaacaatttaccgccaagaaggattctgtcgcggattatatggaggggtaacgccggccctgcttggctcgttccccggcaccgtgatcttcttcggcgtgtatgaatataccaagcgcttgatgatcgactcggggatcaactccaacatcgcatatctatcaggtggcttctttgccgacttggctgcgtcggttgtctatgtgccatccgaggtgctgaaaacccgactccagttgcagggccgatacaataacccgcacttcaactcgggctataattaccgcaatatgcaagatgggttccgtcagatcgtccgccaggaaggattttcggcattattccacggctacaaggccactatattccgcgacctcccattttcggcgcttcaattcgcattctacgagaaagagcaatctatggctaaacaatgggttggacaacgggacattgggctgggcttggaaatattgacagccgccaccgccggcggtatggctggtgtgatcacttgtccgatggatgtggtcaagacacgcatccaaacccagcaaaaccccttagagccccccgccggttcttcgggcgccaaacacactgttgaaaacgtaccgaaagaaagcccacggccgcacacgtcgacaccatcacattcccacccttcgcgggcacactcgcgaccaatctccacatcaggggcaaacacaacaatcccaccgccgggtacaccccgacttgacacttcctccgtgttcacagggttgaagatgatctatcgaacggaaggtattgccggatggttccgcggcgtgggcccacgcggtgtatggactagcatccaaagcgggactatgctggttatgtatcagtacctgctcaaacagctcgaggctcaccagattctagaagagtcttaggaccttacatctaactgcatgcatttccaaggttgctgttctttttacattttttttgtcattgggaactggaggcgttggattctttgtcccgatctgggatgttatgaccctgctttcagcactttgtatattgtgtaccctactctgtgatagattattagactggctgcggcctcctgtaccatatctctttttccaactccatattacatatattgacatatctatactccgggttctatatctgtttagactagtatctaaggaagaagggcaagccatgtaataactagatatcaacaggaaatgcttggacccttctatcatacaaccttggttatatattctcaaaatacatataaaaaagaaagcaaaaagcccagcggaatgacactgaacaaagggagtgaacgcgctagaccgtgttttgttttggcgatcggcggatgtaaacaattaccggccactccccctccttgcatcttctctccccccagcatttactttcttatttgatattggtccaatttctacagtgatatcggatacattatgtctcttccttatctcaagtcgttgaaaaagcctgagttggccgagttggccgatcagaccgaactcccaaagtaagaatgaatgcgattgccgcatagactgagctgatcaaatctatagctacaatgactataacaagaatgatcttgtcgtagttctggacagacacctccgtgaaaaccgctcaatcttctccgggctcaagagtctctctgaatactacttacgcctggcctctccaccccgcagaggaggatcgcccgtgaagcgcgaatccgcgcgaaccccggcacgaaccccggcacgccgctctactaagaaggaagtgagggaagaggaaacggatgaaaataagtaagagcggcctcaacgcgccattcgatacatcgtcatcacgcatatattaacccacgcagtagcgaggatgcggaagaacccgagcccagcccaactgtaatcagcccgacaccagctgtggggcgcacgagcgcacgccagtctgcgcgccaaacaccccaacagacaccccgtcaaccagcagttctctctaccgtcgtggactcagagccatcgctgcccgcatctccagctgccatcaccgaagctatcgacgcacagacgctcaagttgcgcgagagaattgaggatgcatggactgcatcgggcttagtagagcgggcgcattctctgcgagcaacgctgagcagcgggaaggcggttgagatcatcgtgctgctgcttgaaagcggcagtcttgcgaaagagttgatcccgatacgcttccttaccactacaccggttgtgcaagccgtacagatcccggcgattcggatccgggttcctgatttatttgtgctgctggaaggaacgttctgggggccgttttcgctgtggttccttacttgtctgcttttgcctttgatttctgcctactttatcaacttgagctggaatgcttctagcagtacgcgccgcacccagtctgcgcctaatctcgcccagtttgatccgttgacgttcaacatcgtcaaagccttgctcgtgcacattgtgtttggcaaaggtttcaacttctttggtttctatagtcggtatgctattgggaaggtaattgactccgtccctggtggagaccttggtatcttgactggatccgctatcggtggtgtgactgctctgtacgaagctattctgcaccgcccataagcgacaggacatgacttttgtgaggctgtacaggttatctggcgaatggttcttcagtggttggacgtgttttatctcatctgtctccaccgttgttttttcttcgtttatgggttatgcgatatgcgatattgggtttcttttttgccttctctttatctttcttggtctcccgttatagccagagcaggcgccttgggagttcttattctggttcttgttctgatcatctctttgggagattcttccctgcttgccctaatgaccgattcattattttccagtctgtgataaaaatatccgagagtagtagtatatttatagtcaagtttacgcatgctgcggacggcttttgatgttggctcaggcctttgttctgtagataggcggaatgtcgtcaaacctcgcggacgtcgacgacagggttcttgacggtgcttggagtcaagcggttcatgaagagatcgaagcagaagcccacgggcgggtttttatattgatcaaaacgcgcatgggacacgcagcggttggtggaagcaaatttcacatatatgctgctatgggtgggggctgaatcccaaattcgcaatagcgttatgtgattctaacagcctaggcttcgtgaagcgttaggccccggacagactgtcgtggtggttcctattaacctccgtacccaatgtcatgcttcacgctcacggtcacctcttcaacctctccgccaattccactgtaaacaaaaccgggacagaggtctcaacctccaccttgtcggcgcgaatatgattgctcgtggatatctgccctccaatctcggtatgccaattctccacatcccactcaaagccatgggttgtgatctcggcaggtgacgagagggggatgatcccgatattctcttcgaagaagtatactggttctggttctggttgtcgcacttgctcctgctcctgctcctgctcttgctcttgctcgcgcttccgttttctcggtgacttgcttacattagaccccaacgctgtcgcgatatctgctcgtcttgttgcaggtgtgtaaattgtattcttccctgtttggataatgaacgtaatgctttcctcggagacgagatacaggttaccacctgcagctggcttggcatcagaggtgtcggcttcattttcacgaatcgagcgttgcttctgcgtcatcatgtacaagtggtgcacttgagagaaagcctgatccacacgaccacccagaccgccgaggatcacaacttccagaggtgattgatcagatggtgaggttgctgtgctttgatttgcgccattggtcttcgatttggtccgagtgtttgctctttttcggggggaagccatgatatctgcagcatgtacgttgagatatttcagacatttcgtgaagtctgttgagtattggtctggatcttggaggatgggcactccgagcttctcataatgtcttcgaactgcggggcggatagaatcaaggtcgccgacaatggagtcaggaagctatatctctggtcagctcgatctttttgtgctgcagtttagaataaagttgcagtccagagagattatgcaattaatgtctatatatatcgcttactgctttagatccctttccattaacttctggcatatcaaaaagccgattggcacctccatcggcgcaaataatataggatgctgcattggcattagcatcttttatccaggaaactgcatctatgcacaattcatatagaatcttaccatatctgctcaacactccaaaagcattctcattgattggctggttaaggatgagaagagcgtaaggcgaaggactcccctcaggacggaagaaccggctgggatcccattccattgcaagagttgaatacaaaccaaattgaagtccaaaagacgtaaacaaaccaagagaaatcaaggccgaaagggttggtggtgacgatataattatcttgaccaagctgcaacgtgactggctgacgcgggcacgcaacctcaggccaaaatccacatcgctttccaacttctccatcccgcggtgtttcgactctcttcctctcaatcccttcttggtggaactctcggtcaattcgattgattcgcactcctctcacacataatgttccgccccgccgctcgagcgctcgctcgcgcgcccgctgtcgcagcccgtacaccagcgaacagacgattgataagcaccggtccgagcaagtcgagaagctggaagaataccttcttgcgattaggcttggccggtggtgctatctactactacaacacgagcagtactttctccgaggagccgaagtgtacgtgtcgccgattggagttgggtgttgcccttgttcctcggtccccggggttgcaagccgcgacaatcccgtccccgtcaaggttctgagttctggaatcacaaatcgctaactctgcttccatttggctttagtctctatcctttcttcaatccggaaacaaaatgttgatgatgccaacccccagactctcgactccattactcccaggattcggcaagaacgagctgccgcgcaggcccaaaagaacgagtctgctgctttggaaggtggactgaatgcccaggagctccaggaggaggctggccaggaggctgcgttcaacccggagaccggcgagatcaactgggactgcccgtgtcttggaggcatggcccacgggccatgcggagaggacttcaaggctgcgttcagctgcttcgtctactccgaggaagagccaaagggtatcgactgcgttgagaaattcaagtatgttttactgtcgttttgagggcagtggtcctgtgctaacaatttttgcaggggaatgcaagactgcttccggcaacaccccgaaatctacggcgccgagctggaagacgacgatgagccccaaccccagtccgatgctcccccctccgaagctcccgctacccccgaagctccatccactgccgccgagctagatgcgtcgtcgcaccccactgagaagcagacccgcgccaaggatgtcaacacccaggtgaagaccgagaccgttgctgcaggcgataacgtcgagggcgacaccctcgttcccaaggccgagcttgacgtcgaggagaaggagcaggctcgcaaggcttagaaccgacctgcatcctgtttgacgccaccctccctagagacaagcctactgcttgatctctcttctgtaatgcatatcagggactgggattggacttgtgtattatatagacctttctgccatctctccatctcccgtactgccttcgatgcattttcccctcctgatctttcagcatatccattcccccgatctgcgctcctctgtgttcttcccgatacttcctctctgtcaatgtgtaacttagtgtactgatatgctttacgctcttgtcctttggacaaataaaagaaagaggggaaatctactagactttttgcatcatgactggtatccagtatggagcttttgtataagcgctagacaaggtgggtattttccgtggaaacttgttgaatatagatatcagtccctgcaaaccccagcttctcttgggagaatttccataacggaatattcctgttgcgagaaacgggagcgattgtcgcccccccccccccccggcaatcnnnnnnnnnnnnnnnnnnnnnnnnnnnnnnnnnnnnnnnnnnnnnnnnnnnnnnnnnnnnnnnnnnnnnnnnnnnnnnnnnnnnnnnnnnnnnnnnnnnnnnnnnnnnnnnnnnnnnnnnnnnnnnnnnnnnnnnnnnnnnnnnnnnnnnnnnnnnnnnnnnnnnnnnnnnnnnnnnnnnnnnnnnnnnnnnnnnttttcccccccccccccccccggtgtctctttcaaaagcaaaaaaaaaatgcatgatgctccgcgctaatagctgaagacttaggggaattaagggaaagagaaatcgatatcatagagagtagcattcccaatgaacgacgtcctctccgaccatctctgtccatattaaatatttagtaccacctgagaagtataaaaatgtagttgattgtttgatcttcctcttcttactattgggcttattaggccaactcgcattcgatcaagctctcgacactgtccagcggcgtccagattttagcaattctgagcccaaccggctcaataatttgtgccactgctgttcagtccgctccttagcagcaagatccaccatcattattaggtccagagaagtagcctgccagtgggccccagtattgggaacaacgttctcattgatcagcaacttgctgtatccgggtgtcatggcggcgaccaattgtgacaagattttctggcatatctcgtcgttccagtcgtgcaggacggagtgcaagaaatatactcgcgcgcctttggatatgtcagctactagctaacgctctatgtgtgtcaatccactcacccttgatgggctgttcttggtagaagtcgtgggccatgggcttaattgccgggttcagcgacttgatatcattcaaaacatgcggttggtcttgcaggatcaatctgcccggtgtgtttggccacttcgatacgaactcgtctagatcgtgccctttgtttcccccaacgtccacaatgaatacgtcttcctcgccggtctttgctccctcaatgagagtttgtactgggtagaaatttccatccatccagctaggtctaccttggtggtaggccgacatgagattgttgaactgagcgccgagttcaggatagtcggggttcttgccgttgaggaattcgaagaagggatactcggttttgaaccctagagtaaacggacagtctgtaccattggtgggacttcgataattgtttttcttgagccaggtgggcagcacattgattgctggaagggtgcatccattactgccagcggaaatcaaatcagtacaccaatatggacgggagaacgcctagaggtggaactacttacatgcacggccaagcatcattgtaccgcttaatagccaacgtggtagttagcccgttgcggccatactcatccataccagtttcgacaaagacacccattgtggcgagatgcttcatgatacgacctttgaaattataagcgtcataattatttgacttggaagttatcactgaccgagaagttcgggttccgcacctgttattgctgcgagctctgctaccgttttaggcttgtcagtctgcgctaatatgcagaagatccccagatcgatgcaggtttcaatgccggcaaacgctgtgggctattacgcataaacaatcgaataagcatccttggttcctgaactaagatctccgttctgacgtacctgggcccagcagtatcgtagcatggtttcctgtggcgtttccattgcctgtacgagagaccgggctgtctctagcagcttcaggcgcgcatcggcgttgccctttctgtaagcctgggaatgagattcaatttccttttgcaaatgcaccagtttctcgggagcgctgggtgtagtggcaacttggggatgaatagcaggtctgtttgataaaccgatgactgtcattttgaacgttgtccgtgaacttggaacaaacaccttgcaccgagagcaaatggcaacattagaacggaagtatgaactatccccagcatctggctagatgaggggaattgctgtctaagagcgatcatttgtgacaaaagtcccgatagctaggtatctcatacttagataaaaatgagtcaacctgctgtgggccaatgctataagaggttatcgcattgttattgtttattgtattcttcatttattcggcctgaaaaataatggagccagtccaactaaaccacttatagatgagtggacagggattatcccgtgtctactatttagtgtatgcgggtctacgatataggacgaaaacttgttcaatagactgggatccgcacactaaacccacttgcagttactggatggaggcttcgcaggaccatgatgcatgtcgctaatgcattttgccccgtaatttacgccagagcaggccaattgaatcttgtcaagattctactatagtcaccctcggtttcaatgctgatgcagatagggcaacaaaggcccaagtggccaactattcttgtacctatatcaaaagtgagggtgaatgaccgaatttcttgtcggaggtgatttggctctccaattggaccacgggagctataccactcccttctatcagtgagtcgtccgtgtctactgtccacttaaagttgggtagaaatattgacgggccttgtaatacataacaaatatcattattcttgtttaggacggcgagatggcacgtaagttgcgtcgcgccgaaactgagaacgtcgagctagtcactgggaaccaaggcgagatggttccagacaatatacgcaagaagattgactatctagcgtcaaatggccacatcttatccgcgctttccactatcatgtcttcaccgcgagactcagcgtctttagcagtctgtatccattcatcatacgctgcgcgatgaacagccctcgcagcatcctatgcatcgttcaggatccatccgtgagaatctgtatcaagtgtgttttttagccataattttagttcttaaacggactcaaaatcttcgtagtctcgagcatgctgctttaattccgcttctacgggagaatacggatatgagccttctaggcccagttttttccagctagtaaaaagttcaatcaattcttggcggacagcagcagcggagtcgctctatattatttggctgtagtgaaagagtcggaaaggagttgggtcaagtaatcttacagggcggagtttaggagtaaggcctgttatgattgtattatatatctggtagtagatggaattatctcttagttctctttcctactgcttagaaagtttagggtcatcttgatcgttctcggatgaatctttattaggaataactggaagtatagcaaaatcgggtatcttattggtatagataaacgcgggctcgacgcttattgattgctaatctattaggctattaataatagttggttcgttggctgagacgaagatattcctcttatagaagtctgggtagagaagagctcgttttcccctagattccggttctagaagaccggtctgcaatatggccctataaagaagacctgttcgaagggaaccttagatttagagtctagaggtatatctgcgaagtatagactcctataagctaggaagtccagagaagctatctttcttaatgttaatgaaagcgctttagtatacagtatatactgttctgtattcattataggctatacttggtatagttatatacccgctatatgctcctagatgatatattcagtcccagtcggattagaaggattatcgttctagtcgagaattttcgggataggaagtgagatcttagactatactataagagatataatgcagtaagtatatcagctatatcctggtatactaataagccttacaataagttattattacaacttcggagttagttgttagccctagcggactagtaatactcgtgggtatccttactataatgcaaggtccattgtccattattaaaagaaaaactcgactgaatccaccttcgcgcttcttatatttgataattttagttgctcctaggcatatgcgaatggcccgctcacatagcgctgagaagtcaaacgcaatatagcgcgagtctcactcgaggttatcccgattgagccatcttctaccagtgtacgaatgcggatcatcgcctttcaaagtccctaaacaattgcagggaattcaggttactactaacgaagagtcggctgttgcgaatctgttcctggggatgagctgcggggcctgggatggggcacaggggcgttggttttgtttcctatgtcagataatggtcgaatggagtaatggaggcaatgccgagtgattgacgagggaaaaccgaaccgtcgccagactcggagcatattggctagctggtctttcttttcttgggttcaaggttggatgctattcaaatctacaccgcctggcacgcgcctgtatgacgcgatcttaaagccgatgctataacgtcgctgtgacacgttgtcttgttattctcaaccctggatgagtatgatcggatatagaaaaactaaaggcaagttccatttggataaccttgagaaatcaattgccgctggtcatatcttagcatcatccgccacaagaattcggatacatttcacaaaccacttttagatctgatctcctttcgtgctcagagcgagaacctctgtacaaagcttattcaaagctcgtatgaatttatggaggctggaagattgtcccccactcgattggggcacatggagaggcacgagttttcattgcggtatactccatacttgagtggtcgtcctcgcagatctagatcttcaagagcctaggctcccaaaacaaggaacccaaagccagctctaacaattcattttcagtaagtgtcccacacagggactttaggaccaaatagaccgaaggatcttgaatttgcacactccaattacctacgcatatctctcctcagtccgacctcgggagatcctcggggcggttacaatgagtcaccgtctagtagacggcgtctacggtaccgcgacttatccaccgcgcatctacgggccgccagcctcggtcctcggcatagtaccaaagggccacgagtggatcattgagcaaatcccttcggtggatggcgagaataaaagtaaaacggttcaattatatcattgctctattttaagagtgaaacagcaaaaaaggagttgaacgcgcgcgaacggagtacgatcgttcggggcatattgaagcccatcgatactcagtatctgattttctcatgattacagcaagtgtggccaaaccgaggcggctggcggcgccacccattgtccggtttgagacgggataatcactcgttcgactaataactgtacacgttgaagaatatcattgggtaattgtaagattttgaccgctcaactggcaaaactgagaactcgtcgggtcataaagaatcacgagaacaggccaagagacactgaagaggtatggactcccaaaacgccgaagattgacaagaacgaatataacaaaacaagtttgtaattactcgcaccaaagtcagcatcgtaatttcagcatatcattgatgatgggatcatgttgaccagacaatgtcacaatggcactctcgccacattacaaatatcggtagagtgacagtgaggactctccaccttggaaattttccgtcacttatacaaacggaattaattcacaccttttaagaactcccctgttcatgcttaagggtatactccgtcgtgacccgaatagccatggggtcatgctgtccatcactaactcccaggccctgatttccctcaagaatatactcctcactttccgccccggaagcgcgtctcgccttatttgcattcaggacactgtccagctcaaacccgccactcttccgagaccgcgacgaaacaaacgtcttcgtcttcccggaagttccattgcacgcatcactgttgtagtagtggctcttagagttcttgcggttcgtcgagcccagccagcgcgtgttgcggaagagcggtttgatgccgggtagggagacgacgatggctgcgacgaagcattcgcggtctgcccagccaagtgctgtgccgaggtttgtgatcgatgaaagtgagtagtaggcgcgtagaatcgtgcagatcataatgaagactcccgaggagaacatcacaaccaggattattttgcgttcgattgggatttgaagtttggcgaggattgggattgggatgaggagtatgcaggtgtcggatctgtttatcatagtgttagtatggggttctgggctctggggccttttggaggtgacttgcactacgttgaagacggcgatgacaatgtaaagaggtccgcggagagtgcagttgtctgtttcggttagttggctgtcgggtgaataactatcgagacttgcctcctgcgtagggtttgatttgccaatttcgctcaactggcctgcagatacagacatgcgtcaagaggcaaatcaaccaggtaatcaggcaaaatgctgcagttgctgtaactaggtgacggtgccaggttccgtgtctgtgaagtcttagatatgctcaatagaccgttgatgggtgacaagttgacatacgtgagtttccagtaaagacatagaagaacaccctttagacaccaaatatagcagatgtaccatatccagttcatgaaagccagcttcgatccgaggatcatatcagatattttgctgtctgggacaagcatagctgtttgctcgtctagtccgatgttgtttccatacacccctatctcaacgttagctgtgttgtaaggggtaattatcgttggtatttacccagcagatagatgatagcagtcatcgtggtccaaaatagctgccatgacactgttaaaacaaacctagtgaagcttggggaaactgaacataccatgccagcaacagcaaaagcatcatccagctggagcccgcgaaggcctcctatatttagtcgggcaaatagccggactaagaggaagagcatgctaattccatattcagtgaaagtctcgactgtcaaggcatcggcggacatggtgaaaattcaaaacaatgacaatgtccgttcgtgacaaaagcaatcttggatgccttgacaataagatataacactatggagaaaggatctcccgatattaatttcaattgatcagaaacggtgcgatcagactggatctatcacctccagcttcttactacaacataagcctcgctaggtatcttcgctccgatctacttcaagatcaggccaaaggtctatgaaacacatccgttgtaggatcagtctctctgctgttcagttcaccaaactcgagggatttgtcgctagcataaggtatcgtcggcaagtgatagataatctcgctgcttataatcactctgatgtcgcggtgattagggacactactactctgtacaacatgccgatattttccgcaatcgtgtggcacattcctaaaaaagatttgacagggatttgtgcaaggattttagcaaggattttagatttttctgacagtaatacccttgtctaagtctaagatggcaccaaatttactgcaggtgtaatgggacgggaactacggagtacggagtattgccccgcgacaaaggactgagttgtggattcaaggacttcgattgtcccgatttcaagaatagagatccaaaggatagccgtgcatctggggcatatctgatttactccaagtcaagtattgaacagcttatacctcatctctcaaatatgaagaatccaacgaggggagctgtcaaaaaaccgaatgttacctgacaaataatagggctgatcttttcaggagcccggacattgcccggactgactccgtgagagattattagctcaagaaataattagagctgtggagattgatggcaaagacaatcacaacccggtacggattcattgctacacagccatccgaagaacctacgaatgatataagagttctcccaagtagcttgatttgaaactcatggaaatcaagaaatctctgggaaatgaccaaagtcgcattaatcacaggaggaggtgtgatgagcccccgcataaaactcacgaatgcaaaaagaggctaaacttaactaaatacacagccagtggaatgggcctggccgtggccaacgctctatccctacgcgaagactgggaaatccacatcctcgacatcaactcggagcgaggagcccatacagcaaaagaactaccccggacaatattccatcacgccaatgtgaccaaatacagcgaccttgcagccgcgtttcaggacatgttccagcggcatagcaagctggactttgtattcgcaaacgcaggtgtcattgaacgcaccaacttctactccacgtcacaagcagagaacagcagggatgtgtgtccaccgccggagccggacctgctctcgatcgacgctgatttgaagggtgtcatcttcacggcttacctggcccagcattatttccatcactcgtctcacagaggccgagactcgagcttggttatgactgctagctgtggtgggttgtatccgtctttctattcgccgctgtactctgcggccaaatgtgagttctccacctaatttgtacagtatccatgtactccgtatccccgcgtactattgtaccgtcatatgatatcgatgtgatctgttggctgcgatctcatatcatctacaatgttatttcttattctgctgaaacgaccgaaactaacacaatacagtcggcgtagtaggattcatgcgatcgatatcgcgacacttccacgcaagcggaatccgcgtcaacgccatctgcccaggaatcgtacgcactaatctagtcgactcgacgggctgggacagttttccgcctggtcggttcatcgatgtggaaacgatcgcccggctagtgctccagctcgtggatggtggtgaacccgcgggccggggactgactgatacacccggcaggcatctgcccctggaggagttgtacggagttgcagtggagatctcggatagcgggttttatttccgggatcagcatgtcttttgtgatgatggtatgcgtgaggtgatggaggcgacggtggtcgaaaaccaagtgggtgctgttctcaattgttagatggcggaactggttccgtatggagatataatatatcatgtcgtatgttgcaagatcatcggtaccacttaggcaaaattggttagccttgtaagttgttattggtgctggtgtttagatctctgcgataattacataattatccccgttacgatgttggagtcttcgggcttgtctgtcatctttcttttgagcttcctattttggagattcattatgacagaacaaaataggccaagtttcaatgaaatacagtcagaaaaggggaaattctacagaaatggcccccaacgagaaacacgaacagaaaaatacacgggaaatactccacttatacttgcaggggtttaagcgagtcatcgatttggaacctcctttgcggatttatttctcgatcacatggaccaatcaagtagtgaacgcgagattgaactcgatcgactctcgtccagtttatgttttctaaccataaatggcatggacgggccgtccgggacgagcgccacttccttgaagggtcacttttacaggggccaagtcacgagcagagcgttgaagcgggaaaaaacacgggccagtaccgatgagagtggatttcgatttctcagggcaagagcggcagcaccatttacgagctctcactcagatattacatgtgatagatcacattttccgccgttggagacccacgcggaagagaagacccctgttgccgcggacaagacgaatgcgacaatacggagtcgaacaaagctattattggctcgcttgggctttgagcttgggggtgaagatcgtcgcagaccgtgctagtggtggagcctatctgtacttttttatgacgcttggcccgttagggcagtagtactccgtgggtcgggctagaatagatgaaatgcactgtattatttcctacaggtaactcttccgatatgctcacggaatagcatccggaagcccagagtcttccccgtgcatgatacgaaacagtggctcccagaccgtgacagcccgcttggtgatatggccatttccaggttcaggcatctggtagtagatcagcttgtcggctgaacactctaacagctgacccgacaggccggtcgagtcttctaggaaggtttcgtagcctttgagaatggtctgcacagaggtgagactaatttcaaagtgatgtcagtgttctgcaatgttcaagagcaacacaaaatcttaccattcaggcgtgacagcggcaatcatctcgggtggcacaataggcgtgctcacaatccccggcatgacacaattgatgaaaatattctccttttgcttcagcaatggggcaacaccccgtataaagtggtttaccgcagccttggagccacaatataccggatacgactcgtggggaaagatcgcgccaatactacccgtgacaacaatacgaccaccaggctgcgggttatggcgcatgaaatggattgccagctgggtcccatacacaacgcctttgtagttgatatccacgacagacaggtccggtgccggcgggatgttgtcgatgctgttggtcttcgcgtcgtagatgtagatagaagatgtatcgacaataccggcattggcacataaagcatcaatacgcccccagaggtgatacactttgctgaatacactcgcgtattcttcgtagttggagacatcagcggcgaagaaatgcgctctgtcttgcggtaggtcttttaggagggcttcaccggcctcctggcgccgacctacacaagcaaccttccatccttttgtgcagaggtccttggcgagatcaactcccattccagactgtacggatctttgtcagtgactgatagcgggtcctgtgtagttggtttcgtactgacagtggcccctgcgacaatagcaacccgtgtttcaatatgtgaacccatcatacgagctgagatgcgataacgtttgagagttaatgaggaaagaataacttttatcgaggataaaagaaacgaaagtctaccggatcatagtgtacgacttaatgctcgggggtttttcctcatactgtagtggatcctaagccgttgggaagcccctctcctcttcatataactaaagtatggttgaagttaattgttaaaattgtttatatttcctttccccccttttccacccattgcattattgtattgcagcatggctgtggactcagaaaagggttcggtgcaggctggttctccaacggagacaccaagctcaccttcgatttccaatgaaataactgagccagttgtcactttaaagacatggattgtctcttcggtatgcatatgacaagtctactatggtgtgcatgctaatcgcgcatagattctttcttgcggttatggcctttctttctggcctattcccgttgttgcggcaattggcagcatggtctctgctgacatgggtgatccgactggatatatctggtttatcccagtgtgtaaagatgattcaaacgatccaatggaaagtactaatccaattacaggcttggactatctcgatcacctgcgctttcttgatcttgtatgtttataagatatatcttcaaagtccaaaactaattagatttcacagtggcccgaatactgatcttttaggtcggcgttggttcttggtgttgggcaatctggtaattcgatcattgcaaccaaatacatggcgcgtctaaacattcctttaggtatgcttcgtcggtcatattgtggtagcatcagcaaagaacaccaaccaaatcattgccgggctcgttatatctggtttcggcggtgcaaactgtcaggtatgagcccgattatacccatctctcctcaagtggaccagctaaaagatcattcatcatatagatggctgcattcgcgctgccagaactcctccccaataaatggcgacacatcggagtcgtgatcgccgatttcacagtctatatagccgtcattgtcgcaccagtaacagcccgctacggctacgagcttggaacctgggcctggaacttctggggcgtggccatcttccaaggtctatcattcctcggcctgttattcctctaccacccgcccaagcacccgtaagcaagcttccaagcctaaatccagtgaaaccaaccaaactaaccacacacccagcctcggcatcccgtacaaagaagccttcaaatccctcgactacctaggcgccttcctcttcatcggcggcgcagtccccttcctaatgggcattgtctgggccggcgtgtacgactcaaacgacgtccacgtcgttgcccccctcgtcgtcggcgcggctgtgctcatctgcttcgcgctgtgggaatcctttggcaagctgaaatacccgctgacgcccacctatatcttcgctagctcgtggggccgcgacttcactgcgcctgtcattgcgctcggcgtcgtcaatatgttctactactcgtctagcatcctgtggccgcagatgatcacagtgttctacacgaatggcggcgcggactggaagtactctgtcattctgtcgttgccgcagggattcgctattttcttcggtgctatccttctcacctgctttggtagtaagctgcggcattggcactggcagcttaccgggtcggtgtttgttatggttgtttttggctcgttgcttggtattgttacgccgactaataaggggactatgattgctttcatcttcctctctcaggctgggtttgggtgggctctttatttgagtattgcgattacgcagatgggtgttgagcataagaatctcggtgttagtggtggtatatcggggtgcattcgctttgctgctggagctggtacgttttgactttattactctgtcgtgttggatcatgctaatcctcgcctttagttgcgacctcaatctaccaaacagtctacagtaacactctggcgaaatatacggctatatatgtcccttccgctgcgatctccgcaggactgccggagtcgaaggtcgcagacttattggctgtggtatctcaaggtgccgcggcaatgaaatcatatagtcctgccgtggtgacagcagcagaggcggctcttagtcaggcctactgtaaagcgatgttgtaagcacacatactcacatatctcttacccgcactcttcgcaggaaacagtaggaaagaattgtttctaatggtttcttccagtgttgtggctatggtatcgatggcgtttggcatcctgggtcttgctgcttgtctatgctgcaaggatgtcgattcaaagatgaccaacaaagtgagtgacgtcattttctactcggggatatatcaccgagaaactaatgggcttcttttctttagatcgaggtgtatcttgagaacacagatctttcggagcgaaacaagtatcattagattcaactgtttgagcgctaatatgctagtgaaataatgtgccgtctagcaaaacaactcagcatagcttttgagacaaatgcattcagcccaccatattaaggagaggtcagagggcaatttaacaccattacttgataaaagcaatcccttcgtttttttatcttcgttcaaagagatccagttacattgattgctgctagacaaaagactagagatcatggctaaaagatacacctacggcataaaattgatatttgtgtcatccagtctgattcattctctacttctcggagccatttgaacaccatcatccctagatcgaatagtgtacgatcttcacaagagggcagcaaagtggtgatgtctttcgccaggcaattgatgattggcgaccatatcgggatttgggtttctgtatgcgggtaacatcgagccctcgacccagtccaggaaccccaatcaggatgggaaaacgattaaagaaggatcacgggcagcaagaggagtgcatccatttcgatggcattcgcgacggggtagattccattagcaagaacggattcctggtcatactcatacggcattgcctactcgcgttgtgtgcgacgtcaaccagaaataagctcattgggttgaaccaagagcttttcacactgggtagtgcagagacgaaagaatagatccacggtgggacggccgccttccatgggggaaaggcgctggctgttgtgtcaagtgaagatatggaatatggacctcagtccagatagtggcagcattcattaccagttgacgtcgctgagctggagcttgcgggaacggaaggcggaccggttcgcgccggccttgtccatccgctggctggcgggggtgcgcttttcttgggttgctgctttggtatgtctcagttggggcttattcgggttaactaggggatactgctcactctcggtgggttcgggttcggtcgacgcctcgtaattcaggaccaggttcttgatgcgctgctgttcttcccgatcggcttgttgctggctccgcatggcaatagcaaaggtcgagtccgacgggagatcaatggtgcgggtctagatatgattagcaatcggcataatattgcgaacgcggatggaaaatactacctgttgcttgtttcctttctttgtcatcagggaaaaggccattgtcttaggcgcaactggttctgccggtactggctcagggctagactcgctgggcatgttttcccggggacgtttcatgggaagagggatatcaaagacagtcttgcgttcaaaccgtctcgagtccatgctttcggccatcattttttcgaattctcgatcaaattcagcctcggttactgggtcgcgctcctcttcctgtctggtgacaacgatttgttcgtcctcggactcgctatcgctgtcgtcattggcctccgggttgggtccagacaccttcaacgggttaaacgggttaatgggtcgtacttcatgtagatgagatgggggacctacttcggcctcatcgctggattcctggtcctcgtctatttcgggaatagcatcctcctcaagatcctcgtcagaagagctgctctctgcgtcttcttcgtcggcttcgacgggtctctcggaatcctgtacgttgtagtttaaggcaacagcttcgctgaaaatccgggtcgcttcttcaccctcggtagcaagcttccactgcgggcgaatagagtggtatgtatcctggacaaggaagtcgacatccatgggcaacggatccttggtaaataagtagtattgcaagaaggcaaggaagaaatccaatttcttcttggcagagccacggtcaaagcagtggccacacgtgtcaagaagggtgcatgccaggcgcaagcggaagtagtcgtctggcaagtctagcatactgatctttccacgggccggagtcccaccctcatggccaaaggtgataatgcggtacagggtatcgaatatcaccggggaatcaatcatcttgtagttgtagagctcacctagatatttgatttctgcaatacgcttctggttaaatttgaagtcattctgctcgaggccaagcgtgacctgctccaggacattgtcgacgattccgatcacgaaatcctggtggtaccggtacaaagcactgacaagaattgccagaaggtgaatgctgccatatttcactttcaccggtttgctgaacacacgttctaggatctcaacgacctcttgctcctcccagtgaagtttgcggatggatttcaagatcttggtgtaattccgcttgttcatatccaggtagattagtcggcgtatgtactgctccatgggggtacgttccttctgctggatcgctgggcgcggtgggggatcaacatagtagatggcattttcgataaccatccgctcctgctgggccagatgttgcacggtcttcttgcgactcaaggtctcgaggaaagaagccatccggggtgacgattcgggattgcgcaggagataacggccgcaattctccagcaaatggccgatgatttcaatgttcatgcgcgaaaattcgtcaagcgaaaccttgaaacaatggaagataatatgctccggaacgacaccgaacttggtcagttcagctaggtagcgaacattgctcatgcgtacttgaccgaggaattccttggactttcgccgctgcagacttcgaaattcttcatcgaggtacgtggtcagtccctgtggaatatctggcaggtattgtccaagcgttgctaccaggcgagaatacagtggcaaaagatcgatgcgacccttggggatgtccgacatagctttgataagcctgtttcgtgatgctttggagttgacccagcagaaatccagggcaaactggtcgacttgatctttggtttgcaattcggggagcttggcaagaagggagtccacctgagcacccacagtcttgctggcaatggcagttgactggtcatcagcctccgcagcggccttctcgtccgaaggctctccagagtcggcggtttcaccatctggcttctttttaccagactcctcgccttcactcttcttctttttgccatcctcgagtaaaaccgcaggtaccttgcccttcagatcgaccagattctcatagaaacgtctttcctcctcgtcttcccaaatcccagcgccttcaccttggcctcgtaagtaatcagtagtcttcacaaggccaataccaccactggcagaagcatcggtgggttccttctcggctagatcaggcatgtcggttcccaaagcctcacagagcacctgcgtattggccacgagcttttccaggaccttggactgcttctcgaaattggcctggcggtcctcgaagatctcaccactcttcacgtacgcttcggcattacggcggttttgctgtgccagcgctctctggtctcgaaccacgtgagccttcacatcctcaaggtaccggttcaagatatttctgaaccgctgctggattttttctggagtcaggggcaaatcggtctccgaggacccattggtctccgtagtctgcgcctctgcgccagagattgtagtagcgccatccgcctcaacagttttcctgccatcttcagcaagcttcgagccgacgatatcccagctaaagctcttcacaaacaagacagcaaggggcaggtttgtatgatcacggtcatgaccgagcaattccttcagaacctccaatgggaacgggtcagcctgtttgtcctggtccttcgcgcccgcggcgggggtcttggccttcagcggcgtatcggacggtttgttcccaatcccaactgctccctccttgcccttcgcacccagttcctcaggtcgctcgacgtcatcgagagtcttcagcacattgaccagccaaagctccgtaaccacgcggagaagaacgcggtgtcgagacaggcggtctttctcttcgcgttcacgaatctcctggctgagcgctttgagctgcgctttatccggtgtactcagtccgcggccgagcagccagccgatctgtcgtgtgaattcccaaggcccaaaacgctggtgaagcgcgctcacaacctcgactccagcggcaatttcaccgggggatttgagcttgcagagtccttcgtagcaggcggaaatgatctcggaaaggtatttgtggagcgagagggaacggatgtcggcgaggaaagtagaaagggcggaggcactgatgccggtgcgtagacgtttgatgaatgcggtgttcttcttgagcgcggagtcaagggacttgctagtggggaatacatctagttgcaagtggttagcatcatctcgaaggtgggctgcaatggcatttcgtcataaagggagtcagatgggattttaccagattcgcctgcccaggctcgctcgttcaggtcgcgaagctcccctgcaataagaacgcgacatgtcagtcaatatctccaaggtgaggtgtggtagcccgtacttttacgttggcgatccatggctacaagctcaatcgtggggtcctttctgaatgtccgagaggaaagcgcataagtgacgtgaatgccacattggggtaaaaggagataataagagaacagcaccaagctcaaagctttgaagtgaagcgaagccggtcgaaggtctaaaagtccaaaggtctaaaggcggagagcggaggtgaaggcggacttttatttgcttatccaccacttgtgcgataacttcttgtacctacttcacctagttactttcatctcttaacccctttctcgtttctcgtgtgtgttctttgaattcaaatttcaagtttgagtccgagttcgagttcaatttcaatttcgccttcaacgccttttgtgattcgcaatttacaagtctatcaattcattgtcccaaaccccccacttcgccaggtcccaccatgagttataatgcatcaaaaggacgatcatcgcagcactaaatgctgtttcgggctattttgatccccactatgcgcctctgtgaacccggtttcccttcccttttgcggcccttgcaatcgtttctgcagctggtgtttgcggtcctcgttgctccagctatgttggcgagctaaagccggcttccagcacttctcacatagttcctctgtggtgggacccggtgacccggtagtgtttgaaggactatggctctgagcgaaagggagaatgatgatttgttctttgctggctgggactttgccgtggttatcattgtgattgtttgatgccatttcgagtgtggataagagtaatatgtagtagaattggacgtagatggttgccagtggctggtttgaagctagcttgtggtatagaggagaatagtgtgtggtggagaaactagtcttcgtcttcagtatattcccagcttatctgcttgtccttttatatttcttcggtgcggggtatttaaagtctaattgtcgtgtggtcggatcatacggtattcggcaatggtgatccatacgtccatggggatcaaggacctgtcacaacaatcaggtatttgatatgggcgaaagtggtgacgtgcgggtggcgacgatatcgggtgggagtggaactgacatggcagttgtacaaaggaacaccaattccctctcgcacaatagcaatataccaagaattggaagtcttggcagtgatagtatacgtactcgtacatgagcctgtatttgccgtattaccggggatctaggcgagtcgaatgcttgatgattgcggtgattgattgtaatgctatattctcaaccggacttcattccagctgccaagacataacaactatctacggacagtatcaaggtaattgttcgaacagatatattgaaattgacgagctaacatacagtcgtgagtacgttcaaccattggaaagcaaacggacaaatggcaaaaccaacaaggcaaaagcaaaggtaggatacatatagtcgaagagcacgtgacttgaacagttccttctggcagggtcaagctggtgaagcatctctccaaacagacatctgtgacacatgagagccggtatcaggacaactgatatcaaggcaaaaaaaaaaaaaaaaaggccaatgatggccaaaggtaacatgacgcgttgagaaaccaacttcgggatatccaaggcccaaaacgatatagacgcgcttttgggagaccagagtatcgtacaggttgatggtataacaaggagataagtccaaaaaacaggggggggaaatggcatacaagaaaaaaacaaggcaagaaaaacaacaaggatgttgataataatgaattaaaatcagggtatgcctcacgccacgctatgcgagtccccccagcagccagggagaccaagaatcactggaaatatgtactgagaacatccatccgacggtggaaagacataggaactttttcggtcaatgattcatttgggcttgcgccagaagtattgctagacacaagtcagcggggttcgggtacatgaatagatgtatagatatggaggtactcaccttgtgctgcttccgacagttgcgcaggcctggtttccgaagatcatccaccacagcagatcgtcgcatcgtatcatcatcctcatcgggaacgtagtaatattcactctcaagtggcttgccggcggcatccttgccttcacgggcaactctgccaataaacttggtcgattcgagaatattgcggatatcagaccgggacaggccggtggggtactcgtgtccggacttccagtacgcgggagggagattgttcacaatagtggagaagggcgtggaggacagtcgggagaacgcaagttgattggcagcatggttgcgaactcgctcggaccgttcgtcggtatactggggtttagcctcggtcgactctacttccctatcctcttggaccgtagctggctgtctaggggaccgggtaggttggagaggttgggcaggaagcaggttgcgaggagaacgagtggtctgaacgggggaatcacccgcccggaaagaagccatacgaggaagaaggttctctccgaatggtccaaaggagtgaatgataggatcattctcttcgtcattgtcggagaactcttcggatctactcagttcactcaactcgctcgcccgcgaggtgtgaagcatagcggtagcacgacgggcactctgggatatcactccagtgacggtgttgtgacgcttcaatggagagggctcatcctcatacaccactactgcagcacgggaacgagaaggtgtgaagattggcgaggatggggggatggcatgctggacagcaggcgaaggggagacgggcgatgccagacgctgacgatccaagagcggactttcctgcggctctcgtcgggattgacgccgctgagttggggttgcttcatcactggtttgttccgagtcggtagaagggcaatcccttcgttcgctgcgaggccattgcaccagaacacgagcctcgtggacatctatcatgatatctgcatctttaatgtccgaggtgaaggtctttcctttggccaagtcatatttcctcccttggcagtgaatctttatcccattccatcccatgcacacgatctcaaccctatcccgatcgaatggattcggagccggcttatatgtagccttgacatgaacacgagagatcatacgactagcagcaagttggtgatggcatgagacactggaccttcccatcagaataggctccccattctccaacaacattatcgcaggcacagcagacaaaggcgagcgttccagggcagcggagaaggaccgtgacagagaaggtcgggaggcagcgacgccacgaggaggcgaagaggacatgatatgggtcgacgaggtcgggaccggagtgggatacgtcgagacatctggttcgcgtgctacacgcttttgaggcctaggaagggagggcgacgagctcggctcaaaggcaggcagcagggctgcaggacgtttcacgcccaagatcgagccaactcgactcttcaatggagaggactccatagtagaaaggtgggatgaagtcgaacgagcactcctactcacgaaaaataaaaaaaaacctgagtcgaggtcgaggacccgcgtctccgtgttatacaaacacagagaggaacctggggaattttaaaggaaagaaagacagcaaggcctcccctagagaaacaggtgtggtgggagtaaaggaagtagtcaaggagtaaggaggagaagcattgaagaaaaaggtcgaaaggtgtgtggtggtggaatgccctggggcggagggtctcgtccaccctgcgcggaaatgcacgcttacagtccgagacgcgttcgataggcgccaaccacgctccactgcaggctcgcgatttcaattgctgtctttgtgtattgtacagcgaatgactcgtaaatagagtgccgaaaacgtgaaaaagcgcgaattaaacgtttgtttcctcttaacttttgctgtcaactctatacactgcaacgcgtccgcgtctcaaaacacgtgaccccacgcgagacagtaaaccaggtttattgtgtcaggaatggtattcatgacctcaaaattgttcttatttaccctgtagcccctcggacgatttcgaaaaagcgagtgcaacttatatcccctcttacatagtacgcctattcaagtatcaggagtcaatggtgaaatttaagcagtttctctagactcgtacatagctaataccaagtactagggtatactccgtacggagcagaattcatacaattcccagcagaaaatgcaagccccctaattccccctaaccccccacttactttacggaattgatcactggttacctcgtcgcgtctcccagccattgcccgaccacctcggtatcattttagctcgagctttggtcattccaaccgattttccttccaagggcatatgagcgaatgtccagcctgatcaattacgggaaaaaatcacgaacgccctattttttgcactgagttttttgttgacaagtgctggtggggcctcgggtagtttgattttttggtatattttctggtatagttcacttgaccggtcttgtacgaaaccgagcatgaggaaagattttcttggatgatttgcgtatctcaatgactacatgtcagctgtggagttctgcctctcgcgaaaccgatccccttgcctaatacatatatgggtctaacgcatgtgggctgtctgacggacggttatatcaaacggtacagtggaaatccacaaccagaggtattacataaagactgacataactaagcttctacgttgtactcaagttctatagtgtaatattacttgttggattgaacttttggcccgcttacctccccgagctgcggaatggtattcttcgcttgggtcctgtatagatatatatatcacccttttattccaacttggtcatttttgcctttctagtgatcccaaagccggcactcgatcacctcaatcagctttcatatggtgtttctttggaatcacagtgtcgctcccgtccaactaggtctgttcaggctcttatcattcaaagtttccaaaatcaaaccatgaactctagtatatgggtctttcgaaagaatactgcatcgatctcaaatatctaaaagatacctgccgtagctcccatatgagctcgagctctagctgtgacggttggttgggtagcgggaggcagagttttcttctcctcgatataaatgggatataaatcactccagcacaaagccacttcttagcaagcatcgttgccgaaatcaactagagccgaaggttggctgtcggactgcgcgccctctgcaatataacccatatgatgtcagtaatcgacagagacaccaagtgactccacctatcgcactggtagcatataggctatagctcagaaactctggaggttatccatgttaactggccgttgacaagaagattagctcatccattatcgaggaaaggtagcgtctatatgatgagagatcttggaatatgacttgtcagggaagtattcaaatagggagaccatgccttggttgggacggtcctagagaattttgctaaatgcgtcgtcatgcaggcgcgccgcatcgctcatcgtgaagcatatactagctaactaggtaggtgcatacttcctgaaagcttttggttttgtttgaaactcgaaggaacgatcgaggtggggtcatagatttggcgtttcatcatgtatgcgacatgtcacatatcctaagcgcttgccgccacattaataattagcttgtccctcacattgtggggaggtattacaaatatgaaaatacttaagttcatatgtcacacatggttcactggcaggttatgcaacgtgaatcttaagaaaggtctacattgactgtcgttggaatatgtagctagctctggtgcatacttgattacgcatacttgattatgggagaggaaataaaggtgtggaatatcattcgaaggatagtcaggtagaggaaaatatctgactcaagacaggcagtgcacatctgctagactagatcactcaagagcggctagccgatgaccgactgttacagaaccagctgtgtgccataatttcccccgttgaatcaacacatacactcgaacctttcatttcaagcaaggcacaggataaaccaagtcaccaagagtcaaaagagaacatcgggattcgggaaggaagatccaacctctagtcaccaggacaaaggtgaaaggaaagggaacgagggatagatttgaaatcaagaactgattggtacttgaaaataaagaaggaaatctaaccgtcaaataaaaaggatatcgctcccatgaatgtgcctgatctgggggggtaaatgtggtcataagaaataaacaaaaaaggtgcaacgagcattggatttcgggcccagtcacacgtaaaacaaaataaaacttaagatacacagaaaaaaaaaaataatgatccttcgaataagaagccgtgaatatagacagatacacatagggaagtgagatgagagcggtggctctgctcgccctagtgcatgggaagctcatcgaatttcgcttggcggggtaaggactgccgccgaccaaaaagcgcttgcgatatttagtcgtagaagacgtaataggccttgccggaggtgacaccgacctgggagatatcgttagtatggaaatttgtacaccggggggtttcggaaaacttactgtgcagccgctgttgccgctgatcagaccgttggagtcatagaacttgccatcctcgtaacggcactcatcactgaggtcgtcaccctcaagcttaacgttgaagtcgagagccttggtggtggtaggggtgttggggaagatcgacaggaactttccggaggaggtgtaaccgacacccaggttaatgggagcccagttaccgatggactcagtgccgtcaccccactggcaacccttctcagtagacacacccttggggttgacatagtactgggcggaggtgaccttgccctcccagaggaagtagtcctcaccgtcggggcaagtcaggtcgtgaacaacaccgggaacggcggagagaggaacggtctcagactcggtaccggggtagtcagtacggcaaacggcaacgttgtcggacatctggttcttgacgtggacaccgccaacaccagggatgcaaagctgcttgtagttgtcgttggtgaggtagagcttgttgtcactcttacattggagaccaccaacggactggccggtgctaccctggacgctaggccactgggacttttggtatccaggtgggcaagcgtacgagcacatggcaccgtggtggcattcgtcaccagtaacggcagtcacaatgtcgctaatcacctcgtcaaggaaagtgacatactggataccggagtaaccaccaagacccaggtagtcaagggcgatagcaccgtaatccgaagggaagtcaccacagtcaatctctccatcagggaagtcggcggtgaggccggtggcaccagagctggaagagctgcttgagctgctggtagcagcagcggctgtggtggagctagaggtggccacggctgagcttgtcgagctggcgaggatgatgacagccgaggtctcttggaggatggcaggggcaacagtagcggttgttgtaggggcggacgtggagctcgacgcggaagtcgacgtaggtgcggcagagctgctagatgggcaagcagcagccacggcagagtccagccactcaaactcatggtttgcgagaccagcacaggcttcctcgatactgatcgattgagggtcgctcgaactggacgggtccattacaacaaaatcatacacaactggaccggcggccgaagcctcggtctcagcagcgcgcttgtggacgtgaccgtgaccatggccgtgagcggccgcgaggccagccgtcgccagcgcagcaacggtgttctggaacttcattgtagtggtagtgcgaaactgttgatcataatgtgttagttgagtcaaaatccatgtgaagttcttcgtgttcaatgattccccttggtgtaaagcggcttggacgtgattcagtccctgcagccatatatcgcgtttgttgtgtttcgaatcgtctgtatagttcccaaccgacgctcaaaaacaacaacaacaatccacaccacatcacattgcgaaagctattgcaccatatagagataaacgggaaatagcacatacatcacttcaaaggtagtcgcgcgtttgtcggagtcgagtaaagaacagcggttttcaaatgaatgtggagagaacgaatccctcgggtgtgagaaaacttcaagaaaggagggctgtggttggaaagactggggaagaagaagtcagggagagacaaaaaggagggggggcgattcggtttatgtccaaatagcgttagcgtgatagtcacgggaaaaggggcaggtacgggatacagcttcaatatacaactgtctcacactgcctaccttggtagtggaccctggacggagtctggatgctacttgttcgcttggcagataccatttaatctttctaggggttcattctatatacggagcacttctaccgagtcagtctctctttcttcatctggggagttctataacggcatgatccatgggcgaggcagttcctcttttttgtttacctttggtccctgcggcttggcgccaaagcgagattaaactgccaggggcagccaatcagaggcacgtattgcacttttctgggccccataattcaggtacaccaatcagtattcagctggtctgccgagattccttgcgtatccatgggtaccagaagcatttgatgatgttcttcattttacttattattatgtctgctttgttcaattcttgaaaacaacatcattccaacacgctattgaagttactccccccttataacgttacagctctttgctgttgcatcctaggtaatcattgcagggagacgcttgaataagactttcaccccctggcagccggacaacctgaccgatctacttccgcccagcttttccaagacttacagtgcggtgtgcgtagccagcaaggggatttcccctgacgatgctagcgtttgccggttttattattccactttaactggacacacattctagcctagtaccaataataccaagtttaataacataccagatctgacctgctcaatgcgtcgcaaataagattcaaatatcagcccacgacccaagtactatacaaataaatacctagagagtcaggaggtctagaaaacggattattcatatcgttggtccgctgtacttcatgagtagactttcacctataatcatagcccgcagtgatgacgactccgcgcatgaactgcctaaattcacgcacttctccatactcctctagcagccgagagttgctccgcccatccactttttcgataatcggccagccagtggaacaatgataggcgagttacggagtagaagccgaccgacttgtcaatccgccgcaatctttattctactgtttggacggcacggcctggtccgcgtcatagcacgctctagcagacctctagaattgaatcgaaattacactaaagaaattacactaaatttattgcatcaataactacgcggaaaaccgacagcttgttttccatacaataagttcggctgaggcgggtgagcatctgattaagatattgcctttgtcttgacgtactccgtagtcgattcacaattgctacatgtatccaagtaagcaaccagagccaacaccatcacacctgccttttcgggtccaaatattcagctccaccgtcctccgatcattccgattctttcatctttgttttcagctggtgcctgctccaaaaattgtaacctccgtcaacccaacccctgtttctttgtttgtgcttgaaagcatgttcaggtatcatacgttgtataactatgatacgaagatgtttacgcagctctctgggttatgtacgtatggagaatattatagctatttcgacaaatatcataccgttctgctaacattcaagcaattttatatattaaaaacggggctttctacaatttggcttctcggggaccaccgttcgtatcagaattaatttaatttttgtaattataggctccattttcaattccattattgcggcttacagagtactaatgtggagctgcaatggatggactctcactagtagtacggagtacccaacattcattcctaatcgtgtgggttttcaatatctgttgtagttacagcatataatatagcatagaagtacggagtacgaacctcggtaataatctggcatcccacggtcactcccgacgtttggtcttacaatatatgatatattgtggatgtggagtttcgctacgcttacttctgtgtcttccgacgtgcggcatgcaatttcccatactcagtcacctccccatcgctgcacattcaaaacatccggcttgtttggatgctaaaatagggtcaagatgcctatcaacatatattaaaacaacggtttgatctacacagagatccaacacagttgtctataaatagttatccaagccacgatggacttggcgatcgattctcgtgagatccctttagtatctggagaagcgagggatttttccagggtgtaattgtatagtatttttagataattcggagaagcctaaacctgggataatcttcgagtttattccagctgcacatctggttacttgaaacacgtccatcagccgcttcgtacccttgcatacatcaaaccctgcttccaaaagggaactaagccaatcaatcatacccagagacatagtaaacaagattaaggctccgtagaatcccatgacctctgtatatatgtgagctgtggctggagagctacctatattatgtacaagtcgcgtcatttgattccacctcgcttttactcccatagatgatacaatatgctctccgcacggaatactgatgtcactatagtaaagtcagaaccgaaaatcacgcgtaagtcctcaaattacttaggtaggggtggtaagtagatgttgcaaactactatgtcatactcgagtcggcgaatagtacatcggcggactttgggcatagactatctcgacggtggccacggtcatcctactctatgtcgcttttctctttatttcttagacatggatatcatttacgagtcctatgagtcttcgaaatatactatcacgatttccgtatgggatatctaacgagcgaggttaacctgtcttcgatgcacatgccaatcgagattcgcacttagtagatgacagataggtgcagaattgttcatcgaacgtcatatttcgcccaatgtgcctccactgaggctagtgatagataaaaattggttgccagacttgatttgaatgctatgcggataaccgataacagcggtgcgataaggcctcaggcgccaactggggtctgccaagcacggatgaactgccaccgccttccgaatttttttgagtcccgatatgattgcgaaaaaattggagatgttcatcgagtctacaacttgctaaaatgggctcctctactactcaactcacctctaaggtgacctcgggctccccttaccaacttgacaagccccaggttagtaccaataactccccagagtcaatttcgcaaagtacttatcttatttcaattaggtcctcaaagcttccaccgcgctgttgaagcacatcaagtcttctcaacaggaacaggagaagaccaacaccaagaagaccctgattggcgacgatgactccgatggcgaggacagtgcgaccaagaacgaagccatctggctcgttctcaccaccaagcagcatgtagtggataagaaccgactgaagcccggaaaaatcagcatccctcactctctcaacacatctccctcgctcagtatctgtttgatcactgccgacccccagcgtggcgttaaggatattattgcggacccatccttcccccagggcctttcctcccgcatcgagaaggttattggtttctctaaattgaaggcccgctaccagagctttgagagccgtcgccaattgttcgccgagcacgatgtcttcctggctgatgaccgtatcgctatgcgcctggtgcagaccctcggaaagatcttctacaagtctagcaagcgcccaattcccattcgtatcgctgagatcgagaaggcggatggcaagcgggtcaagaaggacactaagaagaacaactcttcctccaaggaagagaagaacgcctctttcgcctctcctcttattgtcgccaaggagatcgagcgtaccctgagctgtgccgccgtgcagctcgcaccatccaccaccgccgccgttcgggtcggttcgtccaagttcacagccgagcaactatctgagaatattgccgctgttgtcaacggtctaaccgataagtttgtcgcaaagggctggagaaacatcaaggctcttcacatcaagggtgccaacactatggccctgcctatctggctcgctgatgagttgtgggtggaggatgccaacgtgctggaagctgcgcctgagactgaagctatcaaggactccaagaagcgcaagtccgctggagatggcaagctgctcgaggagaagaagaccaagaagaccaagcccgcagaggatgaggaggaggctgcatccgtggctgcgcggaaagagaaactccagcaactcaaggctcaggcgctcgaggacggtgacataagcaagcccgtcgcaacgaaggttggcggcaagaagaagaagaagtcaacttcatgatggttatagctcttaatgttctctgcatgtaaaggtatttctggcgtacaaaatatcacgtatctattgttccaacaatttatcttataccagtaattgaaatcaatctaacagtaggaatactaaagcatcgacatacaacataacagaggaatagatctagccttttttcatcgccgtcgcatgcgtcatttcgaagaacgatcgggctatatggccgccgccgcattaaccgagtccgacctcggggagccagtcttggcacgccgacgatagccacccaaattaacatttaccgcgaatcaccgagctttaatcttgctcttcttcttatgtctggaagatcaacgcaaaatcattctaccaagttgtcattatgattccaatcgctaggcactctgtcctgcgggctgcccgcgctcagctccaacccacccggaagcttagcctgcccacttcttcggcgcttgcccgcctcctctcgaccctcgccgtcctcgagcagcgcaatggaaagctggaatcttcgtctttttccgcagtcgcggctgcactgaagctcggtggctcagtaacgggcttcgttgctggctctggtgtgaaggccacctccgctgccgaggctgctaagatcaagggtgttgagaaggtgctggccgtggacaacgacgcatacgagaaggtaaatactctagcagcctctgaaatcaatttcggtagaaggagctttggctaacaattggatttcttgcatcatagggcctcgccgagaactatgcctctcttcttgtcgagaacatcaagaagggcgaattcacccacgtcattgcaggccactctgcctttggaaagagcgtgttgccccgcgtggctgccctcttggatgtgcagcaaatctcggacatcaccggtatcgagagcgaggacagtatgtgacaagagaaagaagtttgacatgtgatccggcaactgaccataatccagctttcgtccgccccatctacgccggtaacgcgattctgaccgtccagtcaaccgacaagatcaaggtgatcacagtgcgaggcaccgccttccaggacgtcgaggttgagggcggctccgccgaggtcgtcgacggagtggaccccaacgttcccgcgctcaccgagtgggtgtccgaggaattggccaagtcagaacgcccggagctcgccacagccacacgtgttgtgtctggaggccgtggcttgaagtccaaggaggagtttgaccgcctcatgcttccgctggcggattccctcggcgctgctgttggtgcttcgcgtgctgctgttgacagtggcttcgccgataacagtctgcaggttggccagactggtaagaacgttgctcctcagctctacctctgtgccggtatctccggtgctatccagcacttggctggtatgaaggacagcaaggtcattgctgctatcaacaaagatcccgaggctcctatcttccaggttgctgatgttggcctcgtcggtgacttgtttgacaaggtacccgagctgaccgagaagctcaagagcgcctaagttggtcgcgcgaatttctcttatgtatcacgacctatcgagtaggttggtaccttttttatctgttaaatgatcgtacagtataccatttactagaggatggaaccaagattggttggccaaatttccatcatttttgttctgattttagtgaaacaattcaatgctttaaactttacgctgaaccttgaaaagaatctagtcacaaataaatcattgtttgagtattgggtacacttgtagatacaatataagtcttgactgtaaaaggactttgcggccaaaacgggactagcgcgttctgcacgcgtcgcgcgtctatcagagggggattacatcggagaccattcaacgacatgaaatgtccgaacgcttgaatgcttccctcctcgccatcgttcctatcctcgtttgaccccgccgtttacctccactcggaaggacctggcaacacaaacccaccgtctgaatcattctccgacgatctcgaggcaattcacctgcaccgccgcgatcagacccgcaacggaatcgtgattcaacatcgagcgtggaatctatctgacgtgtttcgtagcgaagacgacatacaacccggttcgcaatctcaaacccgcattgcctggagtcgtggcactgacaaccacatagtagatacgccgacgaagaacgttacaaccccgagaccattttctcgcactcctactcgaaatctgtcttttatgccatcctcgccgccggtttcgagaatgccgttcatagcgtctccgggcgcgcttacacccacatctggcaatgcgaccaacgattcgcagaagaggaaagtcacaaattcagagggaggtgtgcagctgacagagccgaagcgccagcgcatggttggaggcttcgttgatgatgacgacgaggacgaagacgacctcgctgctttccgggacgagcagatgaagaatcaatatgacctgcccgagcactttattcaagagcctccggcggaactccctagtatactggcaccgctgccgacatctactaaattgaatgctacaattagctcttccaggataccactacacctgacaccccggcctgctccaatggctcccaagagattccagatcaagacttgtgccggcaaggcccatactgtcccgcaaaggaaggcccaggcccccgtttcgtataaacaaatgatcgccaatcggtcccagacagaaccaggaaaggcgacgaagagctattatggtatcgacatccacaagttgctagacgatgccgccaaggacaaaaagcccgtgaacaaagtccctcaaccacaagtccagcaaaccatcgaagcgaacaacatgagctcaaagcagaagaaattagactctgcaatgtggacagagaaatatcgtgctcgtaaattcaccgatctcattggggatgaacgcacacaccgagcagtcctacgctggctcaaggggtgggagtcaattgtattccctggtctagccaagtctcgaccgaagaagcctgcccgggaggatgaagaagagtacatccacaggaaggttctcttattaagtggccctccaggacttggaaaaacgacattggcccacgtatgtgctaggcaggctggctttgaagtgcttgaaatcaatgcaagtgatgatcgcagcagggatgtggttaaaggccgcattcgcgatgcattgggaaccgagaacgtcaaaggtatgaacgtggaggttggtgataaaaaggtccgccgtgccggtaaacccgtatgtgtcgtggtggacgaagtcgacggtgtcactggtggttctggaagtggtggtgagggcggcttcatgaaggccctcatcgaccttgttttgcttgaccaacggaacgcaaaatggtcttcggagggcaataatggcaagaagcgcaagggtgacaacttccgatttatgcggccgttgattttggtttgcaatgacctctatcacagcagtctccggcctcttagggcatcgtccattgcagagatgatcactgtccgtcaagcaccactggagaatgttgtccaacgagtcaagttcatcttcggacgcgagggcatcccctgcgacagtgatggggctcgaaggctctgtgaagcagcctggggtatggcgagcaaaaaaaatcgcagtggcaaaactcaggggtctgctgagggcgatattcgtagcgtgcttgttgccgcagaatttgtggcacacaagcttcgaaacgagtcgtcgccatcatcactcaggctcacgaggaactggctggagactcgagttctcaatgcatcgaccgagggtagcgcattcttcaaagagttaagtcgtgggggtgttcgtgaaattgtgaaccgtgtgtttacagagggggctggcttctctgatgctcctgttggcatgagtttccaagatcgctttgatgccaccaacagccgtattcctgtcggtgtggcagatctgcgaaaacgacacgcaatcaaccgattgcgagaaatggtcgattccagcggtgatcatgaccgctgtgtatcggactgtttcgcttcgtatcccacccagcaataccaggatgataattatttttccaaacccaacgccgcccacgactggcttcatttccatgactcgatcagttcgaaagttcattcatctcaagagtgggaactgattccatacctcagccagtcggttgtcgcattccatcatctatttgctacagctactggcagaaccaccgacgacgataaaaacgatgatgacgaggaagctgaagagccccatcctttctcaggacccagagctgactttgctgctttcgaagcacaaaagcaaaaccgcgcggccatgactgcattccacgcctcgttttcggcacctatggctcgcattttccgatcgaatgaaagtataatcacagatctggtcccttacttgatccgcatgctatcaccagacgttaagccggtcatcatccgtggaaacggtgagcagagaagcaccgccaccgtccgcaaagagtccgaacgtgcgcttgtccagtctaccgtgcgtgtcatgaccgggatgggcgtgacttttgaaaaagtccgagtggaacatgagggaagccacggtggatgggcgtacagaatggaaccgtgagtgggatttcaaattttccgtgagacatacaaagctaacatatcctcaaacagaccaatcgactcacttgtggtcttctcaaagatcaagggtagcaccatcgaggcttcgggtggcacagcgccagtgcggtatgctgtccgccaagtgctagaccaagagtatcgcaaggcaacgacgcgcaagcagtctgatgccatgggcgcgtctagactcggcaccaggggtcccaggaactccgctgagacggccgcagccaaagcaatcagagaagcagccgtgaaacgggatttctttggtcggctggttgagcagcctgcgccacagcctaatgatctagacgacagctgggctgatgagtcgtccaaggctgggcggaaagtctgggttaccttccacgaaggcttctcgaacgcggtccgcaaacccatatctatggcagagctgatggctgggttgtaatatacatatgcattgagttccgagttgccttctttgagcgtttgtcatcgtatgctggagtttttcccatacatttgttgcctaccttccataatgattactgtttttacgagttattgaataccaagcactaccacattgcccgataaatatttgaattgctttacttgaatgagaacataatttgagagaaagaacttttaacatagagatattcctctatttcaacaagacatttgaacaccaagcaaaccagccaaacagcccagattatgatcgttgaacatcaccataaggacagacaaatcaaaagacaaatcaaaagacaaatgcaaatcacaaattattaaacatagtatgtggtatccaaatcattccatcgtgaggcgaaggggcgaacacgtgcacccatgaatcgacgcagtatagcatcgaaaaaatccaacaaaccaagcaccaaaacagacaacgggaaagaagaaaagagcccggaagcatctactcgaggtatagcgagtggaccgagcgggtgtgatcataatcggcgcagaagtagatgcatccatccactggttcgaaaccacttagcgcaggctgaggtagctggcaagcgcctcgttgtgtatcttcttcttctcaacctctatggcattattgttgggtacagagctctgggacttcgagccgagcgagtaccacttgtggctcttggttgatgcgtctgatgcattgagggttgtcgctgtggagacggtcgagtgggttgaggctgcgctcgatgtagtcttgcaagacgctttggaggatttggtgaacattttgtgtgtggttttgggggattttggaggattgcttgagaatttcttgacagcgaaggtaagacgtaaacgaaaagtaaacgagtatgagttggttcggtgtttatagttagcgagcaatgtgtgatgatgatgctgattttcagacctcaaggcttaatgctttgcaatggattggattgggaagtttctttttacggagatatcattgagtctttatatagagcttgggtgattcatttactccgtgtcaggctgccattccgagaagaaagaaaatctcaaaacgctgacgccccaccacctcagtcatagtatgaatacatcgagtctagaagcttttgcactgtcaaaggctggtaggacaacctaagaaagacgtcagtagtcacagccgcctcacgtgtggagccgctaatgatcggagtaagagtcggagttcgatttttactggcgagcggactacacgagggtaagactggtgtggaaaaccaaaatattggatgaataagtcggtcagaattatccaatgggatttctgagcgtgaaggccaagaatatctgataaatgaagctgcttgttctctggggcatgtgtatctatcctctagacccaaacgacgacaccgcacagtgcggagtcctaattcggtaattaattcgcacaccttttgatatgtaactcgtgaaggcttccaattttagaaggatcttgcgaaagggcgcagtcaattttcagtgattgtgcggctttgcatcttactagtatccacgtgttagaccgagctagcgcagctaaccatattcctatttcggagttgaggtctggatcttatccgaaggaatcttagataattctagacaatctaactaggcccacagggttgcatgttatttcagttatactactcggtacatagaaggcactccataatgtgcaagggtagctttccgctgaataacggcctgttttagaccctttagtgactataaattgcatagatgaatacaacataatatgtttgagaatgaatgcctagctgccaaggcgttacgatatagttacgaagtggcttaggatgactcaaagagcggggttgtttacggcttcgtaactttaaaaggatgaggcctttgaagatttgaaatcagagtacaaaggatataatgggatgattcggacgattacaaccgcgggcattaggagttagcacgatacagggatgtgctggttttaggtagtccgatgtagtccgaacatgtagatctttattccgatgctaaatttttagctcacccaatgtcctccgcggccgtcagctgagcaaatgttattaatccgagttccgagagctcagcgaacgtcagacatcagcgaatatcgggattcttttttaatatagtataacagcttctgacctaatgactaattattacataaagataatactgtaaataatgatcacggggtctctatgaacgtctattataagctatgaagacatcctagtgtgaagagagatctcgacattcgctaagacccctctgactagatagatggtcgaaaagcggattaacacggattaatatattttccttcacgctaaattagcggtcccatttcaacattcgatcagctgtaagccccttccaaaggtttgatttgaaatggaattcgatagagttagtctgatcgatgaggcttccaaccttataatttgatcagagccgggaaatttagagcgttagagatctttctgccatccgatctaattaatatactctcgcaataccgcgatttccgttagctatgagctcggaatcgcttcatttttgatatctttatatttcccttcattatcctcttagtatttataccaattgctcccgaattgatcccggttatgggtgagtaataaaagacttaaccctaaaccgaaataataattatagactgtgtcagcgtgtcttcctctgatgggagctgtagctggaatgaagtgccaatatacgattggatatgtcttgaacatattgataggatttttttgaatagacagataggtattaatgacattccaacgttccaagattgaaactcaatgtaagagattaaccatacggctttaggtcggtccatgtcgcggtgtttccgatccttcttctcagagcggttcttttcgcattcctttatgaactaaccgggatatccctccttggatatttctccttggcgttcattcttttgtgtaagatgtttgggcgcacggatacctataaccatggctacaagctgtgagtcgtcctagataatctttctgatcctgtggcgaaactttggatggtctgctatagcccgaaaaacttggatgttcaacgaattggccgaaagaaacacgcgtaacacgcgtaaggaggagaatggtgaaatcttgctaagggattggcacgttaagcgcaaatatttgacatctttgtttaacagaaaggacccaatggatgaaattatattagggggaaacgcagaaaccacgggcattgtgttactattccggacgaggggactggtgactcggaagtatgtaggtatatcagggttgaaaggtgcgaagttacaaagatgtcaaaatggtgaaaacttcaaagccaagtggcccaggcccaggatcaatttcctgatttgaactgatttgaacatgcaactagttaactacctaggtaggatgaagataactaaattagtcatcattagtcatcacctgggcaggtgacctcgggatagagacacccggacgttcgacttggcaacatcacaccggttctcgtcggttaacgcgaaggatttcaactgcctcgcaatgacgtcgaacctttggaccatttgtcagcttcaggttccacagtgccgtatgtacaacgtacgttgtaggacaatgaataatcgacattgtggggtggtgagggggatggaagcttgatttaagagtcccagtcctgatctgattccttttcctttacttctttatttcccaccttacaatccaaataaatacctcaccaaaaccaacaatgtcactcaagcctatcaccgtctacgggcatgccacgggccccaatccctggaaagtgatcatgatcctggaagagctggatatcccctacatccacaagttcataaacttcgcagatatgaagaaagagccattcgagtccatcaatcccaacggacgcgtccccgcgattgaagaccccaatacagacaccaccctttgggaatccggcgcgattctcgaatacttggttgacacatacgacaagcaaaacaccatcagctttgccaccggctccaaggactactacctcgccaagcaatggcttcacttccaggtgtccggtcaaggcccatacttcggccaggctgtttggtttagccgctaccacccagagaaggtgcaaagcgcaatcgaccgctatgtcagcgaaatccgccgtgtttctggcgtgctcaaccgggccctccaggggaagcagtatctcgtcggtgacaagttctcatatgtcgatgctgcttttgttccttggtatcagattactggccggtttgggattgatatggggaaggagttccccaatgtcgctgcttggttgaaactggtgcaggaacgtcctgctattgctaaaacggttcaggaccgggccgaggcctccgcgcagcagtagacgaaatcaacatgaggaggatatttgagagtggatagaaagaaatgaaatagaaattcacaggaatgcgtcggcgctcatgcggcctctgtccttgacaacgtgagactttaataatctggtccgaaatgatagcgttacgtgtaggaacataccattctctgcgctagtacgtccccagatagcctgccatgtcgtgtgtcgcgcgcgaaaagagggcgctgagagatgagaacaaaacatgctaagatttgtgccttctctcgggatatttcaagatccccacggcccctcgatttgccaattctacagtgctggataaattcagattcttgaacgaccactcgaagactcccgattgttgactgatagctcggcagctacatccgagccggataatcaatactggccatattttggaagcaaagagcagatcccaggatggctacgtgataatgatatattttggaagtccacctgatgcccacatattcttacaaacgatccttgcgtatatggcgctgtttacacatggaaacaatgaatatatggacccatcttctgggctcggtggcctttattgctgtaagtttcactccgaatcattccgtttcgattctgaaagacctgaatttcacccacggcgatatatttgcttttggatcattcctgacctcggcaacctgttttgattccacacgctaaagcctaagaagccactcttacaatatccaccatctctggggcaaaatgctgttgctttggtggctgcagatgactaccttcggctgcacaaaatctgccaagtcacttcgcagcgcacttctattgactactagccggtacctgaatcaaataattcactaaaaggcgctagcatagtatggtctgggggttcgagattttaagcttagcctagatatacagagagttagagaataaaacaggctttttgctcagttaacggctatacactgaaaataaaaggaatttccctaatataatcactgtagaatgcagaaatttgagagacatctaagaggtcacagacaatacagccatatgtcttttccttcaaatattgccttgtttgatgactcgcagaggccgtgaaaagaggataccagtcataccattaatattgcggtcaaaatagacctcgggagtgactgattcttccaaggtacccagggtacttcttctccatctcaaccatggaacgtacaatccgtctccaaccacggctcacgacactgaccacattatattgatctataaggaacaacgcttcttagacgtcagatggtatggtcattgaaagaaatgtccacctcaagcagcagcttggatacttgctgctgggaaagcgaccttggcccatattgatgcagccatcgaacaacagcccgtgatagtatataactatgtcatgtgaaggcatgctagttctacaaaacgccattactctccgtttacaatctaccagcagaaggcttcacttgcaaaagaaaaatgagcacaactccttctgctgcggggaggcctcagtggtgttgcataatccttcctttttactgttactgttacactcgcttcttttatctcacaggcgaaatacattaggtaagatcggcgcagaatggctcatgtcaatttcttcggtctttgctaggatattcactcttctgcacatctccgctgtctgaatgttcggtaattcccgagttttacttgcatacgtttgattgtttgccaatcccttcatctatcacagacaactccaatctattatttcatatcatattaattgcagattagagattgaagaccctgagatagccgtttgagccatttcttcagcgccggtggtctccggtggccctggcatgttagcgccgaccccgcaatttcgttcacgaatcatactttgtaggagatcaccgtgttcttatctcctgacaacctcttgcatagatcttcttttttggctgtaacatcggctggcttcatggcaacgggactcgcagcaagtggaaaccgccggcactcgagactatataatgtagttgggttttcgctgaccttcataaacaaacaccccgcgacccactttggtctgtgacccctttgaagttttccaacaatggtgtctctattcaggattgctttcgtcaccttcggggtgattcatggcgcaaatgcgtggggcgtactaggccacgcgactgttgcctatgtggcacaacattacatttcttctgaagccgcatcatggtaagtcctccgaaagagcttccagataaagacagtatccaatgctaatctatttgaagggcacaagaaattctcaatgatacttccagctcatacctagcaaacattgcttcctgggcagatcaataccgcctcaaagatgacggcaaatggtcagcccctttgcactacattgatgccatggatgacccgccaacaagctgcaacgtggactacgagcgcgactgtggagctgaaggctgctcgatctctgccattgccaactatacccagcgtgcaggggatagcaaactcactactgccaataccgccgaagctctcagattcctcgtgcacttccttggcgatctcacgcagccattgcacgacgagaactacgaggttggcggaaatggcatcagtgtcactttcaacaactactctgacaaccttcattcggactgggatacatacatgcctgtacagctgattggcggtagttcgctcgccgatgcgcagggatgggccgacagcctggtcgatgaaatcacttccggcacctacaaaaagcaagcagcgagctggatcaaaggcgataccatcagtgatactatcaccactgccactcgatgggcatcggatgccaattcttttgtctgtactgttgtcatgccggatggagccgctgccttgcagactggcgatctatacccgacatactacaactccgccatcggcacgatcgagctccagattgctaaaggcggctaccgactagccaattggctcaacatgatttacaagcagaatgttactgctaagaatacgccagggaaattcggcaaagggcaccgacagcctgaatttgtccgcgagcctcaccatgagcctaataagatgagccgcgcaaatctagctagagctgctatgggaggatcttgctgcaaatcagaaggacgtgagcatagccattgatttaatggcatttgtagatgttgtggattcagctgtctgaagccagccatccttgttaggaccattgttgatataatattactagctacatagacatcatgccttttctttctcgctatccattaattttccttttatctgctataaaaacatacaacagcacgtctaaggtggttgtcgcctgcgtccacggttcgggcacgggtggctcgccgctctatctagggcaattagggcggattatccccgttgcgatgtttgagtcatcaggcttgtctgtcatctttcttttcagcttggaatgagcctattttggagattcattatgatgagaacaaaaataggccaagtttcaatgaagtacagcaagttacatttacctattctgatcaaaaaaagctgtaatatcatctttcccctctgctttccactctccagccccgcttagcaagatgtgtactaagcaagacttaggttcacggataacttgtgcgcgctattatatatactggtcttttggctgagcggaagagacgtgcgcaccggcatattctttacaccaaattctatacatttcgcttcccggtttaatattcaaaggttattagttaacgtagtccacagccgagccggctataccagccgacatcacataataagtgcgatgaattacaacatgatatctcaacaacggtggcctataatagacttttgtttcagcctaatgggtttatacgaagtccagccttttttttaagagaattctagaaatctaataattcagtgattatatttttagcttttagccctgtattttcaaacacgataagctttttactgatcttacaattatactttttcacccaaactagttagattgtgtctcactagtctataatacgctttcgttccagaccgacataaactttcaagagtaagacaattaaacagaccaatgagatatgattctacttattccgaaaggcgattgtgtgcacgcttcagacacattactgtctggtgggacataatctagacgtaaatgagcgcgaaagcagcgccgagtacagccatggctcccttggggccgctgagctgagatgatgcagcatcagtcgagggtacagcggaggcggaggcactggtggatgaagagtcggaagaggaagtggtggaggctgcgatgaaaaagttgtattagtatgattgccttgtaaaattgtgcggagatgcatcatgcctgaagaagacgaaggatcagtcgacgacgtggatgtcgaagacaccaaggatgtaagggtgggggtgacggatgtaaaagtggtcgtcgcggaagaagaagtggtggtggtggtagtggaagaagaagaagtggtagtagacgtagaagaagaagacgtggaagtagacgtagacgacgtggaagaagacgtggaagaagtagaagaagaggtggaagaagacaaggatgtagtaccatcatctgaagcgcccttcttgacagtaaaggtgtcactgacggcgagctggcccccagaatcaattatctggatctcgtagtcatctctaaggcatggcagaatggtattagtgttgttcttctctgctcacccaccctatcttctacatacccgttggaaatgctagggttaggctgggtcgtgtattcgccctcagaggtcttgacgttatccgccaatttggtctggaaggagccatccttcgatctcaggatgatgctgattaccgaagggtcactagaaccgctagtgaatttgatagttttggcagtggagaaatcccacaccgagtctgacgagggagcggtgacggtgatggccaaagccgatgagaggaggctcagagcggtgatgatgaatgagtagcgcattttgattgactggaatttctgaattgcttgatggcgagctgatgggaatgtccactatttcttaggataagactatataggaactagattgttcgaagatctatatacagaaatcagtaactttcagccgaagcccagcgcattgagaatacgagatagtaatccaaaccttgcatagaagctgaatatgatatgaacatgcgctgagcctcttgtggagacactgaaaaattcaggggtcattctggtgaccacgtatattgtagggtagcaacgaatgggcattgctaagatcatcactgcaccagcgacccgtcctgttgtgttgagggtccatccaagtaagcattgcaccttatctttccaatcaagtctccagcacgcatcgtccttgctaataaagggttaaacttaggcgaccagcatgtcagcgctaatttagcgtttgggggtgcagcagatatggagtataccgacagggctcggaaatcgaggttatcataatggagatctattttcgttgtattgtatcgtcacttacagccgagaatgaataccggtcatgactggtaatattcatcagatgagattggtaggtatgccgtcttactctgctgcgcccaatgttcaaaagcgattgtcggaattcagctccaagtacggagtttctatgttggaccttactgtgcgtagccagacgagaagcggtagagttgaggtttctaattagggcaagttgcccgaatgaggggtgggtgcctcaggccactatctccattctaaggttctatggagtagctactcaacacatctcctatgttccatggtaattcacgaggtaatatgaaagcaatagaattaattatacggaggatctagtctatagtaaaaccactgcataaaccatcaaacaacgtcaacaaacaaaatcaaaaactaattcggacaggaaacataattaaagcggtaggaatggcggtctagagatagatggaaacgaaggaggtggtcaatgcgaccgtgactatcatctcccacgacaagctgaataacgaaaccccagcgccggtggaagcctttggacttgctgcggaggttgtcgatgttcgggtgtgatctccacaaatattgctgcttcggttcaggctttcagtaggataatacacccgaggccctccatccgagctgaggtccacattgagatttccgcttgaatcggtcacatatgttttgcaagacaagagctcgctcacattctgtccggatgaaaatcctgtgccgtcggagccaagcgtgattttcgtggtagctttgcgggatggcttggctcccaggttggacacgacgctcacaacctggttaccggcaaatcccttgcgcatggccaaaatgtttgttgaattgtagatcggcaatgagaggtatgatagatagtcgacccctgacttcggggcgaccgtagacttttctccgtcaccgcttgcatatgatctaatgcgattcaacgattggactagcgaaggtagggaggtcgagtgcattgagtatttggtaagccatagggcctcccggttgacaggattgaatccacctgacaggtgctgttcctccccgtagtagactgtgttgcgtttattagtatcgttggctttcgtttctgttcgagggggcacaacatacggatggggataccgtcagcgagcatgctgattgtgagaatgttgcgagccagctaatcgggagcgacaaagtcaatgcgtgctgacaaaatacccgatgcactcgacttaccgatatgtctgaagtatacgagccaaagcgagcgacatcctgattcgatgtgaaagttcccaggggcagtacgtcctcgcactgtttcctgacgtaatctatagactgtacgattctgttcaggtctccgtcggtcgtgttgaaagcctctgtgaggatataatacctaaaagtgtcaacacgccctccgttcattttgatgaggtactcacaacggataattcaaaagtccgggtagaccgggctgtagagaacagtaaccggatgcgtctcttgtggcgccttcgcccatagtaaaaacaccggccgacttggtgaaattggagaagaagacggggggaatgttcaagacactgtcgattcgcaggccatcaactacaaagaataactgttattaaattccttggagacataggagacacatagacatactggagtagttggaaaccaactgcgaaatccaggtgcccagcatctgctggacttcctgatcctcgtttcgcagatctggaagcgatatggtcgtgtctcccatccagcactgataaaggcttagcaatgctctcacaaatgctatgacagacttacatccagaacacaggtactgtttacggggtcctcagaaagtagcttgtagtcgtggaaatacttctgatcattgaatggattgaacttgctgtagtcgatagtggaggcatttccagcccaggccatgtcaccaacgacaatatccagcatcaagtactattttatatgtcagttttgggagtagacatggcagccggcgactcaccatgccacgcgcgtgcaatgccgcggataacgcttcgaggtcatcggaagtgccaaaatgggagttgatggaataaaggtcgtttggccaatacccatggtatgctatcatccatcaatcgttagttctctatatccgttcacagtcaatatgaccatacctgagagatccgccgtgcgagttgactcctggctctgcactggagagatccagaccgcatcgaacccgagttcctgaatgtaatccagcttattgatgatgccctgcaagctccctccacaatactctcccagagctgcaacacaaggagcgatggttgaattatcggatcgagcgaagcgatcggtgaccacttggtaaacggaccgaccgagccattggtctcgggatgccgcatgtactgtcccaatggcggcgaccaccaaaaccttccaccaccacattgtcagtggcgcttgcatgacaggtcaaaggtgaatcaaatgacggatggattcagagacaatgaaaaggctacatatgtacttaaatttattgacaatgccatataggctgaaaattatttacggtgaggtacgtgtatcttgtaccgtatgtgtaatacatatcttaacgatctgtattatgtcggcccgatcggcaagctttgctgatccttgaaaatcccgcgaactcatcgggcacatattgcttccgagggacggagtggccgtgaaggaaagccaaaaaaaaaagcaataatacgagacaacagcaataagccaccttatcgtcatatccaccctttcttataggtcagtcctgtatcaggtatgacgtgttctatcatatattaggcgggatacccgatctggcataatatacactttatgatcttcggcacgactggtctagaaaactcgtatagctttgcagcaaacacgtatatcattctccacataagcaagctatcgagcaaagacccacttcgtatattgggttcagggctgtggaccactccgaagatcctataccgatgcatgtcagcttgcgatctattgtccagagttatgaccgctcaatcgcttagcgtgagtatggatatgctttactgtggattgaggctgtatagcaaggctggatcatgtctccagtggttcgcctaattcctgcgtctatgctgattagtattgaatcaattattgcattggcctggacatctccggagttttcattatctttcacatgcttctcttgcgcatatgtgccctatgaatcgttcactatctttccttctatgagttatcgcattcttcttggtatgcaccctgtggttttttgactgcagtcgaggctcgaacagcgtgttctgtgaatatcaccatagtggcattcactgtgcggaatggagttgctcacttccatcactcaataccttgccattgttgcaatatatatacgcattgtacaatcattgccctatcttccagaggaagcagactggaatctcaatcaaaatcagacagcgacacatcccctcgactactcgggtcggtgggatgaccacacatacaacccctcgccagagaattggcgattcccgttttacacgatatttctcgacagatttgtaaatggcgatccgagtaacgataatgcaaatggcacacagtgggaacacatcttgacctctaacgagttccgccatggcggcgacgttcttgggttggttgatacgtttgattatcttcaggggatggggatcaaggtgcgcttttttgcttccggaagattggacgtggaaaatatattaaccatatccagggcgtctacctcgctggaacaccgtatatcaactttccttgggccgcggatggatactccccgctggacctgaccctgctggaccaccactttggtacaattgaagattggcgcacaatgatatctgaggcacatcgacggggaatttatgttctttttgataatacctttgcaacgtatgtgggatctatctgcgcaacctccgatgtcgtctgctgattttgcacagaatgggcgatcttatcggcttccagggtttcttgaacaagtccgcgccgatcaatcccaacgagtatgactctgtatggaagtatgaccgtcgatactgggactttcagcctggaaatgaagttgagagtgaatgtccctgggagtatcctcggttctggaatgacgacgggaccggtttgaccaccacaacccttggtccttcatgtcgggatagtgaatttgatcaggtaacattccctttctttcgacattgaacatgactgacccctacagtatggagaagttgccgcctttggtaactacaccgaatgggaaggacaaatctccaagttcgcatttgttcaggatcgtctacgcggatggcggccggacgtgctagccaagatcaaacacttttcttgtctgaccatcaccatgcttgatatcgacggatttcgcgttgacaaagctctacaagttacccttgactctcttggagaatggtccgagtatatgcgagattgcgccaagcaggtgggaaaggacaatttctacatccccggagagattgtgggaggaaactcttatggctcgctttatatcggtcgcggtcaccagacaaatcaaaccatctccaatctgacggaagcttttatgatgacgaacaagacaaataagtcagatgaggatctcttcttgagacccgcggagaggtccgcattggatggggcggcgttccactacacgttatatcgtggtctgagccggtttctagggttagtttcttcctttcaccactttcagtttactcaagctaacatcgtcccgttcagtctggacggcaccttcactgccgaaggtgacccgcccgtcaactttgtggatacctggaatggtcttgtggagaccaacgatatggtcaacacgaacaccggtaagttcgatcctcgtcacctgtttggtgtcacgaatcaggatgtcttcaggtggccagggatcaaaaacgggacccacaagcagaatttgggtctgtacatcgcttcgttgctcatgccgggaatccccatcctctcctggggcgaggaacaggatttctacgtcctggaaaaccaggctgacaactatgtcttcggtcgtggacccatgtcatctgctcaggcatggcagctacacggatgctacaaactgggatcatcgaaatacgttgatttcccgctcgaccgctccctgaccggatgtaaagatgattccgtcagtctcgatcaccgcgatccttcacacccagtacgaggcctaatcaagatgatgtttgagatgcgtcaaaattatcccgctctgaatgatggctggtaccttcagcaattgtccaaccagacgttcgacatctaccttccaggtagtggtggaacaccgacagagacggggatgtggagtgtcatgagatcgcgctttgcggatgcgcagaatttcgatggccaaggccaggggaaccagagcgtttggctggtgtattctaatgacaacaaaacagtcgaacacaaattcaattgcagcagtaaggatgctttgatctcgccattccccgcgggaacaagggtcaaaaatcttttcccgccgtttgaggaattgacgctggccaacagttcgactaggcttgggtatgattgctattctgagattgattgctgttactgacaatgagcagattcgaagggtctaaagttcccaacgggtgttatcccaaccttactatgccggcctggggtttcaaagcctttgtcccgaaggataacttcgtccagccttccccgtatgtaacccgcttctccccagggcatgacgctcggcttgtgccccagggaaaaagtggggatacagttcgaattggcttcgaattctctcaggagatggactgcgtggatatcacgaactcgctaacgataacgtcaaaagcgcttaacgacgagagcccacaacttgacactacctcggtctcttgtaaaccaattacagagactgatgttgtgacatggcccggggcactcactagcgttttcagctacgaagtagatttgggcaatgtcttcccaggggttcacagagtcacacttaccaatgtgactacagcagatggaaatcaatccacaggtgtgagtaaattcctcgctatacagattaagaaagtctcaatactaattgaggcagtccgttgaccactttcttttccgtatcggagagataaacaatccgatggtctggccacagttggccaactacagtagaacgctattgttcgacaacccgtcgtctgaaactgaacccttatcagtaatgccacaggcccctggtgcagacatgtggcgttactcgctggattttggagctacattcagtaactggatgacatacaccggcttcaacacttcgatccccggcaaaaactggtccggcactgcgaagcaggcctgggaaggagaacacatccttgcccaatactggagcaagttgaccggaagtagcgctcactggcaacatggagacacgcaatgggcatacaagcccccacgtcgcttcccaaacctcttcatcgaaggcgagttcaaccagttcggatatgacgctggctattccaacaaaatggctctcagcaacgtaagtggccagtgggaaatccacttcatggctgaatggcccgtgcaagttgcattcaacgcctgggggttgaacgaagacggcttgcccgatcagacacaggtatttggggacattgacggagacaatgtcctggatcaggtccctccagtcacgcttctgagcaatgtgttcaacgttacaattccacccccttcgccctatctttccttcaagctatcggtgggtgacggcgatcttagggtctacgctacgcctactggatccaggtgggttcagctggccatctttattgtgctagcaattgtgcctgtcgctaccgctctcggcgcggtttttgtttatctgaaggccttttaccaggtcaaattcaatcaagtcggtgtgaccgagaaaagatcaagtttcgctccgctggtgagtccactggtgagcgtctttcaaaaggtggctcatcgatctacgaaccccggacttgccctcaccaatgtgggcccgtttccatctgaaaatggaggcgtcgttggtgccacggtaaacacctgccgacgaaccgtgctcattgcaacaatggaatacgatattgaagattggggcattaagatcaagatcggtgggctcggtgtgatggcccagctgatgggaaaacatctagcccaccaggacctcatctgggtggtcccttgtgttggaggagttgactaccctagggacgaccctcgtgagccgatggtaatcaccgttcttgggaataactaccaagtggatgtccagtatcatcagctgcaaaacatcacgtacgtcttgttagatgcgcctgtgttccgagctcaatccaaatcagagccgtaccctgcccgcatggatgatctggattcggctatattctattctgcttggaatcaatgtattgccgaggccatcaagagatttccggctatcgacctctatcatatcaatgattaccatggcgctgctgcccctctctatcttctacctcacacaatcccatgctgcctatctctgcataacgccgaatttcaaggactctggccgatgcaaactccacaacaaaatcaagaggtttgcagtgtctataaccttgaccatgcattggtaaagaagtatgtccaattcggagaggtgttcaaccttctacatggagcttccaactatctgaaaatccaccagaacggattcggcgctgtcggtgtctccaagaaatatggcaagcgatcgtacgccagatatcctattttctggggtctcaagaacattggagcgcttccaaaccccgatccatctgacatcgccgagtgggatcaaaacgcaaacaacaaccccgaagacgttattattgacgctgagtttgaagccagtcgtgccgcactcaagaaacaagcacaagaatgggcagggcttaaagttgacccagaggccgagctgtttgtgtttgtcggtcgttggtctatgcaaaagggcgttgatctgattgcagacatcttcccctccattttagacgcccacccaaaggttcagttgatgtgcattggtccagtaattgatctctatggaagatttgctgcgttgaaattgaatcgactcatagatctctatcctgggcgagtcttttccagaccagagttcactgcactaccgcccttcattttcagtggtgcagaatttgccttgattccttcgcgcgatgaaccgttcggtttggtggccgtggaattcggacggaaaggagctttgggcgtgggatcacggtaagacttacctggcttgaatctaccaacagtgctaacttatgttccttttttagtgttggtggccttgggcagatgccaggatggtggttcacaatgtgagtttccttctctctctctctctctctctctctctctatgttcaaactaacacattctagcgagtctatgacaaccaaacatcttattcagcagttcaagatggccatcaatgacgctctgaaatcgtcgcaggagacacgagctctcatgcgtgcacgatccggcaagcagcgtttccccgtagcacagtgggttgaggatctggaaacgctacaaaccacctcaatcaaaaagcacgccaagtactctaagcgccacgatcgtggttcatggagattttcccgtggcagcactcttgtcccagaaagcatccctaaagtctcgccgagctcagacaacagccgcgaacagagcagatcacgcggctccaccgtatctgtcccaccgagtaggccgattacgactgagatgagactgtctggacctcgaccaggccttgactatgttccctcgccgacaactccgtctttcagtcttaacatgtccgacaacgagcctgattctgacgccgacccaagacgcagacctttgtcctccaaccatctcacagactcgcgagtcgtttacacctcggtaagcgatggagaagatctcgagcctatttccggggacggcaatgatcgtctatcgccatttaggacacctaccgtttattttgctcgatccggtgccagcacaccagctctcagtgcaggatcagaagacggtgtgctgggccgaagagatgcaagggcgtctatgatgagtctggtcagcgtggatgatataacaaaggagaaacaacactacaatctccagaaagttgatccatttttcacggatgtgaataacgagtacgcggagaagtttgagaagaagcttgcaggcctgaatggcaagaattccgaagaccagctctgcatcgaggagtttctcgagaagagtgaaaaagactggttcaatcgataccgcgacgtcaagctgggcaagtcccccttgccatctcctgctccctctgtctttcgtttcaaggttcatgaaatcggtcgctcagagaccccgccaattaatggtccaggtgcaaggcccaatactgggcaattccttctcccaaatgactatgttccccccacgggtgtgaagcgtttcatgttgatgaagctgggtgattggcctgtgtactccatcttcctcgctattgtaagttgaaaccctaccaaaaaccttcatcatagccattgacagtattattcagggccaaattctcgccttgaattcgtaccagatcacactcctgaacggtgagattggagagacggccgagaagctatacattctggcatccatctatcttgcctcttctatcatatggtggatggtcttccgtctagtcccctcagtctacgtgttgacgattcctttccttgtacgttcaagttcctctatccagcttacggggttgcaagctgactagccgcagatatacgggctcgcctttctatttgtcggtcttaccggtcacatccaaaacggcacaagtcaaacatggctacaaaatgtgggagtcggcttgtattcgtttgcgtcttcgagtggttcgattttcttcgccctcaactttggagacgaaggtatgcaccaactcttctaggaaatatggaacttatctgactttcttgttcaggtggagcgcctctgaggtcttggatttacagggccactgtcatccagggcacccagcaattgttcatcagtttcctttggtactggggtagctggatggcaactctcaatcaaaaaggtagtgagcaattcagccttgccatgaccgatccaggtgctttgctcggaatcggactcggactcgcctgttttatgtggctgttgggagccctgatcttctttggacttcctacatattaccgacaagcaccaggtcaagtgccgacattctacctatcgctcttccgtcgtcgcattattcttgtatgtctcttccagtcccccctcaagctaatcttgattctgacactgtattttgcagtggtttttctacatggtgtttatatcgaactactggctgtcggcaccgtacggacggaactggctctatctctggtccagcaagcatgcacaggtgtggcatatcgtgctccttgttctcctctttttcatctttgtctgggcggcagctctctgggtctttcacgtcttttccaagagacacgcctggtttatcccgatctttgctgtcggtcttggtgctcctcgatgggcccagatcctgtgggcgacctccaacatagccacatacatcccctgggccggtggtcccgtagccggagctatccttggtagagcgctatggctctggctaggagttttggattcccttcagggtgtcggtaagttccttctcgcggcgaataaaacgtaacaaaaactgacttacgccaatacagggtttggaatgatcctcctcgtcacaatgactcgattccatgtcaccttcacacttctagccgcgcaggtggtcggttccgttgcgactatcctcgcccgcgcgacagcaccggataagttaggccctggtgatgtcttccctgatttctcggctggggtcgcagccggcttggaaaaggcagacttctgggtgtgcctgctcttcatgctgtccatcaatgtgctctgcatcttcttctatcgcaaggaacaacttgcgaaaccttgactggcgttttcttttctttttttctgctttgcatccactcaacattgtgaggcgtagatattgtgatcagaggattaattatactataatcggttgcatttgctagggcgcgatagaccttgtaaaggtcggcccttgttttggatatgtacataatacaagtcaggtatccaaatttaatgttcatattcatattcatttggtgcttaataggcatcgatgcttctagtcctaaattaaattcattaatcaataccttgaagtggtttcccttggttggacttcccttattctgtcaagcgggcgtgtcccgatcgcgcgaaaatcaacaatatggaacggtacagcctacgccggtttaggactagtccggggaaatgacttttccgagccggtactccgtatatattagtcatctgttattcccgcttctttcattccgatcgcttattccaatggtccttcttatgggccctatgcaaataatattacataagattcaataagtaactaggatagtcatgcaaagtttaggctttaggcccatttgcccactttaatgggccgagtcgactttgggtctgcgggagacctttgattagtgctcttgccaatatccgggcccatacccatttgccttgcgataaattatgacataacagtcatgtccacaatagttggcaagcgcaagcgtgcaaggaaggcatgcataccttgccaccagcgcaagcgaaaatgcaatggggagtacccttgcggcacgtgcaccacctatgaatataactgcagatacgccgacgatgacaccaccaacactgcgggtaaaaacgaccatactccactcctggacaagcgcatcattaatgacggcgggagtactatggcgatcggtgtcaccgccgaatcgcgcagcccggacagccaatcccatggagcgagagctgccggagctgacagttcatcgtcaaagagttctgccgtcggggccggcatcttcgacgagcagaagtccagatacactggagcatcggcagccatggccttcccgcacatcctgggggtggcttttggcgccgacagccctccaaagatcaactcgttcgcgtacaactttgggatccgccccgaagaggcttccaacgcgtatggcttcctagggaaactaatttcagaagaaaatctcgccttctactcaaatgtgtacttctctgcaatgggccctatcggcgactgcttggacccaagaatttatgcccagcgatgtcgcgattattatcgtagctccggcagcaacgcggtcgccttcagcgccgtagccgctggtgtcgctgcttgcgggtcgttcctctccacaaccaggtacccgggggagtctgatctactgcagtacgctaaagctattctcgatgatcctggatctatacgcatggtaagcatcgaccatatcgtcgcgtggagcatgcggttattttatctaagggccacagcccgccctagtaatgcttgggtcgcatcatgtactcttatgcacctttgtgaagtggttgggttacacaaagaagagaatattaaaaggatggcgtctgctgccggtgctgctgttgttgggcatgatgcggaccggctaaggcgaattttctggatctcatgggccgcacatcacatgctgtcgtatgagtacgatcgttcggctgtaacatttgggaccgtgacttgtcagcccatcatctccattccggggtccgttgccgaccagttcgtgcaaatagtccagatcatcccatcgcctaactcgccgttccagctcgaaagtcagcctccaactccgagggaggagttgttccagcgtctcacggcattgagtaaactctgtttcactcatccgttcctagtggtgacgaaggcggaccttgcgttttgtttctatcgacgcatttatcagctcaagacaggcgtgacagacgagataattcaacacgtcattgatagcggtaacgacgcagtgagagcggctgagaagctagccaaccagggtcgtctgttgtggaacgtcataggcagcgtcttccagtatgtctgtgtcttgttggccatcgacacgccggcctcctccgctcacatccctgccgcgttcaaagggttggagaatcttgccagggcaacagacacaggatcgacccgtcaggcattgtcaatagcacggcatcttctcagtctcaatatagcaaagaagcgaaaagagcttctgcagcttgaagctgtggagtcgggctacgaacccttccaggcgcagccggaacccgatgccaacgctgcttttacggacattggctggggtatggactgggatcagcttctcatcgagccatatctatctattttcggacccgacatccagctgtagtagcgcaaaggggcattgtgaaataatccactcagcggcgattcaactcattaaaccatggcgtggcattctataatggtctaggatgaaattcagtgttacatttatgtaaaattgccattgaagacatctaaacaaattcttcctgcgtttcgctcttttcctgctccgccctttctggcgtcatggactaatgccgctccacaaaacagaaaagcagagccacagctaaacccaggccagagagaccgacaccgatatacaatacgccgcgatatctttataggacatccttcccattattattgacctgcccctcgaccgtgccggcaaactgtcgactttgtgctttggatcatatgccaacgagcggctacggagtatatttattcgattcgtgctccgtgaggctagaggctgagcccctgcacaaatcaataaagctcctctttctccacatcgtgatcaactggatcatctaggccgtaggtatgcacggaggtctgttagtcgggagtggactcaacgccgcttcaatgttggtgcagcggagcgggtctaactatggcccccaatgtgcggctgctgcggccgagatgtgcgggatgaccatccttaaccccgacggtatctccctcattatggggcttggcattttaacaagtacctttggcgctaatcgccgcagttgccgcggctattccggagcggcccagaacttaccacagtgcagctgcgacggtgacggtcatgcgcgtgttgcgactcatagtgggttgatctggcctacgggttcgggggcgcaagtatctctgcgcgaatcaagttcgaaggtctggccacatcaatcccgatatgcgagctgcccggaggataaatagctgcgcggaattagcgtttcggaattatccaatccgatcgttgtaactaggctgagatggagagaatggcaacaaagtttggctctgcggcgatttcgagactgggcctgaagtgtataaatggacaggtattctctgctccatggaagatttgccagacacccaggagctcaaacggcaacagctacaagagctaccatacttcggacaccacttttgaccacaatcacaacaatcgatacacattgaatccccaattcaaaagaagattttcaacaagagcaaaaatgcctgagtacgccaagaaccagccagccggcttcaaaaatgccattgagagagtcgccattgtcggtgtaggtgtatccctccagcagcagccatgcacaaaaattaacaaacgtccttaggccggaggcactgttggatcccacctcgttgccgctctccttaaaaccggaaaacacacggttacggctctctcccgcagagatagtagcaacaaactccccgagggcgtcctcgtcgccccagttgactattccaacgaggccactattgtcgctgccctcaagggccaggaattcttcatcatcacagtatcccccactgcgccccgcgacacccacagcaagctcgtccgggcggccgccaaggctggtgttccctacatcatgcctaacgggtacgctggcgacattgaacacactaaactcggagaggatatcatgctcggtcccgttgctcaggctgccagggacgagattgagagcctcggtatgaagtggatcaccgtgtgctgtgggttctggtacgattacagcttagcggggggtgaggcgcgcttcgggttcgactttgacaagcggtctctgacgatctatgatgacggcaccaccaagaactcggtatcgaccttgtcgcaggttgggcgcgctgtggccaaagtgctgagtttcaaggtgcttcctgaggaccaaaacgacaagagccttactgtgtcgcgatggcttaataaacctgtgtatattaagagcttcgtgatcaaccagaccgagatgtttgagagcgtcaagcgcgtcacaggcactagtgacgctgactggactatcactcatgaggatagtaagaagcgatacgcagatggactgacaatggtcaagactggtaacatggctggctttggtaagctgctttacgcaagggcatttttcccagatgatccgggtgattgctcggccaaggcacagaatgagctgcttggtctgccggaggagagcctggatgaggctactcgagctggggttgatatggtcaaggaacttcagcttcgtgttgagcgtatggcgtcatagaaaatagcatctgcagggggataccattgcaatgcaaacttgacatgaatagaatagaaaagggacggagaatgaaaatgaccctgataaatttaggggattgttataccccctggtttaattctactttacagactccgtagtcaaaaagcccctacattttgatcataaaaaacgtgtatttcatctcatacctacatgtttgaatcccttgatgatgatggagcagtttttggagcagattttgaagtaattgttgaagtagttggtgtgataaaagtaacttgattttgttgatggtttatatacaaattgtgggtatctaccgtcctcaagttggtagggagttcaatactaagccggtgtggagggcggtatgctgaatcaggcagttggggggggggtcgaattagcaattaggggggtccctttaacagtcccctaactataaaatcaccctgaggcataaatagcaacgcagacaccttcaaccaccttctcttcttcccatcccatggcaattccgaagccaagaggtgaactcatggagcgaagatcaatatgagcttcgtcaatttgctgtacacaatctgcttattactgccgaccgatttaaagtgggacagtatccagccagcatcatctcaatttgcatatcggtgaggctatcacgattcaccgggtagcatcggcttccggggcctcttcagttaagagaatctcttgtttactttttcctcttctctatctctctgccatctcagatactcatcacatgggtttcaccaaatgatcaacccaggatgactcttccaacttcctcctacaatcctatcatctttttacggcaagtcttctggtggaggcatagacccgtacccatttgagggttcatgaagcgggtaaatgaaagaaaacccaactgtaagtgcagtgtcgtctattaccagtctcttttgactacggagttttacaatactaatgatgatactctgtatagggcagatgatctcgtggcgatacggaataagtggctcgctgcgctacataccgcaagctcttgcaggtcaagatctacggaaccaacaatgatttaaaacgatcattaaccacaattttaggtctcgagatattcatcacgagagagtctatgtgaagcttggtggcattgagatcaccaatctttcacatttgatacacttcgagccggctgaatacaaagcaattgtcgacgatgatctggtagatcccgatggtgagatacaggtcttacttgaagtcaaggctaggcatctggtatcgacttcatcaagagaagtcctgatgcaacaggggcttgaaatgctggcatgggttgctgaaactctgggcattgaagggtcagagggaccaagagtcccactgagcgactcaccaatcaagaggtaggttttatcatgatcattatactaatgcttaagaaacatcgctaatcagttgcctatagatgggtgatgttagcccaatacgcgacaagcgtatatttcatcgtcgctgatctccgtgaagggtacattgagtactcgatgacaggcgagcgctcagagaacccccttgacaagaaggcatttctcaaaatggagatattgggacctttcagcatctattctgcggaagagatgcggatgttcgggtttcttgttgtcgccctgacagttgtccagcaccgggattggaagaagggtaaggaggtttagatagtaaatgaaaagcatattcttcctcacatagactcccggactccctaatatgtgtgagtaaaccctctttggaaaaacccatcagctagcatacacgcttccgcagtcgaggcaagaaatgcatcggctcctgggagactcccgcagataaagctgtctacgtataagtgtttgagaacagaacagaataggagaagccggggaatatattgtagcgagagcaaggaagggaactaaaacgcgaagacgtagtagacaccacgagcaaacttctactttgtgtcgcgtgaagggcagttcagcccttctcaagcagcaacttgggatctccgacggaagttttggatatgagcgtgctcttcgctgaaaaggtccgggccatattcaaatgctctatgtaggctagtccgtttcaaccttgaaacaaagtatctgcgttctgatgacacttccatgacctaactcggagagcatcatctcttactatatatcatgctgttgggggttacttgcgcaccgctatgcaagcgttagaaatcccccttattgaaatattatatatacagccatgacacgccttggacaagaaaaacgaacatggggctagctgaagtagtccaaggcggtgtgcccaactatttagggcacatctggtggcagctgaagcctgagacaggtggatgccgtgcaaaagtccgcccactcttaagtcagatgccgctctagtttgtccaatagaaattcgtccatcgctgatttcactgaacttgtccacctttgcgaaaatcatcgtgagagcttgaatcgagatctctagattgctcaagtatacaaagtatggagttaatagaggaattaagaatcgaaagtccacgccaggaacaataataagcaccgaagggaccgtggacccctaagattgtgaagctccacagtgacgtcaatggattttccttgttaatttcctttttcaagggcgtcgaacgccattttaggggtttaaatagatcgaatggcgcagcatttaatttccgagccttttcctgctattatataaacacccccaggtcgtttctgccgacggttgagtggtttatttagggttgatctagaattgtcctaccttttacaatctatacaatgaggtacattctggcacatgccctcgtacaggcctcacttctctcaattacctccgcctccccggctccaactgctttcgccaatatcgctccacccgatcccgtcgttacaccttccccggtcgagcatatcccttctcccattgttggccgaaacatcttgagcgacgttgattctgatatcaaaaatgtcctttcggggcttgggtctgatctacctacatgggtcgcatctggagtgcccaacttcttccaggggttcccgactaaagacgcagttgcgagctccctcggattggacagctcagacttggcggcattaccaaccaatgtgttgaacatcgacccttatgcgaactggaccaagtcgggctggaacgttcgcttccacggaaacgtttacaagcagccgaacacatctgtctccaagttgaacgatttagccgatatcttcctcgtcaacactaaaatcgcggaccttcctcaatcccagcaggtccaggcacgaaatctgactgccgagatctttgtcgtgcagcagccacatgttgcggtgaacaagatccacatcaagcctgcggttagtcagggatccagcggacagccaggcggcggcggatcatccaacacatcaggcggtacacaagacatcaccctaccttacaacacaacagccgaaggtgacttcgacacctttgtgcagattgaaagcaatggtcttactgcgggaaatgaaacctcggcaattcagagactggacactcatgtcgagggcgcaagtatcggaaatgctaccgcctatcttgtgcctccaaccggactcaccgtgatttctgacattgacgatattctgcgtgtcactaagatttacgaaccggcgcaaggactactcaattcgttcgctcgtccattcacggcttggcagaacatgccggatatttaccgcaactggtccatcagcctccccgatacgcatttccactatcttgtaaggctcctctggctccccttttcttaataaaaatactaatagtcattccagaccaccacccccgagcaagttactagaaactacatgcagttcatctacaccacctaccccggcggctccttcgacacccgtccgctcaactttagcgacgtgtctgccactctgtcgatccgcatgttcttattgcaaaagattttcgaaaccttcccggagcgcaaattcgtcctggtcgcagacaccagcaacagcgacgtcatgcgcgattacccgaaactggccaccgaattcccgtcacaagtccaatgtattttccttcgcaacacttcggcaaccgattcgggcgacaagttcccctacgacacgtccggattcaagggcctcaagcagtcaaagtatatgttcttcgtgaacgcggatgacctcaccaacctggacatcgcaaacggacactgttacaatcagtcggttgcacagaacctgacgttcagctaccagggattgccatttggactgggggatactccaactgctgtcaacgcgtcagcgaatcaaactggagcggctagcggactcttaaccaaggagtcggctggtgcgcagggcttcatgacattgatcgcagcgatgtttacggccgcctttatggttttatagaatcttctagttacgagtgctatgaactaaatggacaatttgatacaagtctttattttttttaatcccatatatttcagcggatcgcagacagcagctagctcttccagcgtcgcaactccagccaaagaaggaatctcctcaagaacctcaagcagactccgatttcggtcgagggcagacttacaagcctcataaacgagatcatgagcgccttgtcgtcccaaatgcggtgccagtcccataatcacagcatcaccgacaatcaaccccttggtggaatacagattgcgtttcatcgagtcaaccttaaccaccaatcccccgagggcgaaattcgtctggtgcaaagcgcccaccgcagtcacgaaaacatcgggaatagccacccattccaaataccacggtccagatgcacgctcaaagataaccattctatctaatccgagagacgcattggcacgcaaccagaccacctcactggagataggattacgcttccggggcatcgtagactaagcatttctgtgaggtacgaagggctccgagacctcgtcgaactcattggaagacatgatcattacgtccaatgcaactttccccaatgtgccacccaccagagccaggaagttgaggatctccactatgttgtcccgcgcaacatgccaagtgatatcaggattctttagcccaagctcagcggcaagctgcttacgaacccggagccctgtatcatctgcaccaaatacagcgatcgtacccgctgcaccgccgaactggacaagaagacaccgctgctcgatctcctcgatgtagatagctccgctgctgtagatcgatgaatacatcatatttacttcccctgagttatcagtatcacaagcatagtcttttactaggccttctcggccaaaacgtcatcaataccatatgaaattttcagaaaaaatggggaaaacgtgattggatagccaaattctacatgacctgtttggaaggcttattcttacgttcctctctagtctctcttccagatatgatgaccgaataatataactattttaccttcctggaagatggtctctcgtacggggaattccaccgagaagggtttgtatacattttggtcttcataaacctgttactaatagtcttctaggattccccatggcggatgggtagtagaccggttagttaatgggggtatcttatatgtctcaaatgctaacttgcagtacagtaatcaccactgccgatatttccccgactttgaatgtgaaaataccgagaagcgaatttcctctagatttactgagctgccatgagcacaagggccaccagcgctcaatagtcgggttctgaaaccaggagaaatgtggcgataaacggccttcctcgatggagctctttgcgattgctgcattaacccacgaagaaatggcccgggttgataaaaggttgtataagaatctgttggacgagtgctactttactttcccggtttgtttttccttcttgggtatcgttagtcttttactgatatatcttagcatttagtatttctgatggacaaatttggcggatgccgtatgttgcaatcttattttaatggcaagcttcatgttcaattctcggagatcctagatctaggacatatgattgccgtgcctgcttaccggcaaaaatactttgatatggttgacagaaaagactttctggagaagttgaacctgcttctaaagtgggcatggcccattccacaaggaaacaccgttgcaaatgttccaaggaattatggcaattgatttgctgagatgattttgcttgatattctggtttgcttatcttcaaggttaatgttgctgctctcagaaaatgaacaccctgttaagaattcttctctcttgatggcgttcacattacacctgttaccttagtatacggaggcttatagcctccatgggtgacttatttactatcggctgatactactttttcgctttctctctgccttcaattgatatacatattactcatggataatagccgcagatccactaagccatggaatggtatttagctttgccaattaattgatactaagatgtagatacaaggccgaagcaaaaacaagatggcccggaaatggtatctgggtgcgggccatcatcgcaatgagcttcccgatcatgtttcacatgcaatgatatgaagctaatctctctctttatactgccgagcagcataacgaacatattgaggagcaacaatgcgtcggaatgcctttccatatcgaaggaagacaacgaagaccatcaggatagcaattgcaatcaccaaaatagtgatgaaggtatttttgagaccaaccttcgccacccagggtgataacgcgaagataaacgccgtgctgaaactattgcgcgtgagtgttacacccactagtgcatctccaacaatctgaattggtgttagaatatgctctgaaagaatcatgggttcagaatggacttacatctttgtacgagtcagttaagtaggtgatggtgagagtgttgataggggtgacaccgatgttatataatgccagtccgacggcaatgacaggccatggccggttgtcattcagcccgatagcaaatagaagtgcgcctgcgattataaatgggagaaagggaatcatacaccagagacgcatctcggggtcgaagatgccgtttcgccggcgagagagaaatagaatccaccaatcactcagtgggccaacaatgagcgcaccgatagagacgccaatcattctcggtaggctcatgaggccaacctcataggaagagaagttatagggagccttgggcagataggccgacatagtagttgacatgacatctcccagagccaccaagatgccataaacaagtgccgtccatgcgatggctggaatagtcgtgagaacaatgagaggttgatacatgtggcgaaagaaggactcgttcttggtattggatgaagaagtggtggttgttaaggctagtctttgccaatacgtcttcatgggaatattcgggttgattgtgacagcagtgatgttgggttcatctgctttgatcgagctgagatctgcgaatccttgctccgcatatatttccttcattctggcggacgaaagcttctccaaatcgtctttgttgcggtcttcttcttgagggttcggtgcaatggaccggtcttcgttcgtggtatccagctgcacatctggagtggcgggagaagccggcgggcaatacttggtctcttcgtatccgaagccgacaacaaacattgtcacaccgaagatgatagtattcagccaccagatccacctccaacccagaccactggcaacaaacccggcaattagaatacccaggtagctagagagaagccacgtccagacatagagagcattcattcttcctcgttggtgcacgaagaaaagatccgcaatggtcatttgcacgatgacctctgccagactcccgaagaagcattgtatgacgttgatcgccatgaggtctcccacggtttgcatcttagcagaccaaatgcagactccgaattgaacgatcgtgctgaacagatacaagggtcgacgtccaaacttgagcgcaaatggaatcagaatgacggagccgactcctaaagcagcacagccagcagcatagctgtcatttaatatctcgctggtgaaaccgagctctgtctccatgggtccccatgttggtgtattggcgttgataaactcggcgaccatagcgacatagaagcagactagtcccatgttcaaacatttccgccatggggcccaattgaggggatcgttgggatcgtcggatggtcgtggttgtagaataatagtttttccatcggatgcagttgcatctgcaaggtgtaatgtaccgggaggccacatggaattgttgccagtaccgctattcggaagcgtcgaagacatattgagatcgaagatgatagaccgcagaactggatgagttgtgaggtctgaagggtgcacatatgtttgccggaatcaaaagttgggcattcttggaatataagaagtcgggtgttggacagtggccatggatgaggccagagagcagaccttctatagcagacagaatctacattactcaattactcatttgtgaggttatcacacaaatccttatctgtttgaagtggagtgctataaaccagtccaattggtggaatgttccgggagtggcagggttaaacgtgtgaactaagatggctgtggagcaaaaacgagggtttccccttttaattggcgtaaagtcccggttcaccccactggagaagtcgattaagtgaattaagatagccgtggagcgaaaaagtggtggaaagtcccagttatcgcagagaacaaaatgcggagtggcgaatgagggcccaccaactcaaccgttctgtatgtagtcagatgtaactttccgagcaagacaaggcggcttatcgcttgactcggaatgctaacgcgccatgtgtcagttcaatggcgagacaggagacaggtggggggagagcggggggaagcggacacgtataaatttatttcgaatctccaaaaattcatcgctcacatctactagataccgttcggatctgcattgggttgttcgtttattttcttcggataaccgacaaaatgggacaagatgcattcgaaaactttggttttccgaaacggaccaactattccatttcgcactggctacaatcggtgcagggcgatcctcttctggatcatcgaacaacaccagagttgcctgcgtctgcagacatagtgatcatcggatctggcgtgagtgtcttccgatgttcctgtaacttgtcggaagggttgctaagagctgaaatagatgtctgggacaataatcgccaaaaacatcgtggaaacctggcccgaaaagaaagtggtcgttattgaggcccgactattctgctccggtgctactggtagaaatgctggtcactgcaagcctgaccagtggcgaggcttcataggctatgagaaacaatttggtactcagcaggccctgaaggtatcaaattatcaaattctccggttatgcctccatatacgctaacgtagacctgcagattctgcaaaacgaacaacagacatggtccgaagtcgtacaatacataaaggagaacagtgtcgaatgcgaacattggagtggtgatacactggatgttccagttaccccccaggccgcggagaatgcaaagaagatctttgagcgctacaaggcggcgggcggcaacgttgaccacatcaaggttacaaacgaccctaaaaaagcagcagaggttcgcaaaagcgatgcatcttcaattgacccggctgacaggaatccagatatcgcaaatcaaaaccgcacaagcatgttatgcgtggccggcatcgacgctacacccctggaaacttgcggcgcacgttatgcgtgacaatatcaagaaaggggtgaacctccaaacaaagactcaagccaccagtgtcgtccattctggggaagatcaacacaagtgggtcgtcaaaaccgaacgaggcgatatcaagtgttccgaagttgtccatgcaaccaatgcttatagttctgcactcgaaccgtctctgcgggggctcatcacgccatgtcctcacatttgcaacaaggttattccacccaaggctgatgcaggctttgaaggcttcaagggctcttatggtgttctactcccccaagacgccctgatcaccatcaatcctcgttttaatggaggcggtggggttcttttcggcggcagcaacccaggtcaagatgagtttatggagtggctagagaaaaacccgcatcggtacattgacgatggtctgactggatttgactcggtcacgaaggctatccaggaattcgcagtagaaggattcgaaggatggccctccgatgccctgaagcagggggagacttataaggaggcctggagcggcatccttggacttgtaagtgcttcgcttgatatgaaaatcaaatatgggctaatattagatcagagcgaagacggcctgcctttcgtcggacaattacctgcacttccaggccagtggatttgtgctgggcaccacggacagtaagtccatacatgtctcccacgctgccagaatggctgtgaaccatgctacgctgacacttacaactcattagtggcatggcacgtatctttaccgtagcatccggcttggtcaagttgatgaatggaagctcttggactgatacgcggctgcccgaggttttccaaatcacggcggcaagaaccgaacggctgaaagagcgcgtgaagatatcacctgttcgtgctcgtatctgagtctccaagcaaaatattgggagtgtggtatggcaaggtcgagtttagtgttagtatgtatttttgactggtacgttcccatggggcttggacttgctaggaccgtgtaaaaaaattcttcatatgatatagaattccatacctcctagatatctgcgcacaataatgctctaccaaaaacttccgccatttgtattatttgctctgatacgcccgaggtgcggcacatttacgtcatagtccaagaatgatgacacatcatcaggtgatttcatcccaaactgcacgtgacccatacaaatccccacaagttctgttgagattcagttaactaactaattaactactaaaaataccatttcttgtataagaaggataaagaagaaacccctacattaaataatttcctaatccgcacattgcgggcacaagtcacgttacttaaccttgtaatctcccaactccacctacaattggggaaagcgtagaaatcacggcaatgcggggatttataagaatcagtggaatgggactagttcactcgttaccaatcacttatttgggtgttttttgtttccatttcggattttcctttggcaaattgatgagccaatcagaagacttggttccatcaatcttgcgagtgataagctctgaaaatgtactgggaaaagagtctccgtgctatctctcatcattctcactacgtccagccttgctcccagaacgtgaccacactgcaatatcgaggccgattgaaaaattgatgggctattttccattgtattctgcttcatgtttcaacctggacataataagagacagtcatcccgaggcactccatcgggaagcaggacaccgctcgcgtgcgtgaaatgcaaagaaaagaaattgaaggtaggattaaaaacctcaagttaagctcagtctcctaatccaataataaagtgtgacaatagggtctcaggatgtattaactgtctccgtgctggatctggtcggtatttcttttgccactcggcttcttccattgatgtgcgggtttgtgatgttaatctgacaccgaatgacagtctgtctcgtggaagatccagtaacgagggcatatcggccgcgaaactacattgaaaccttagagaaacgggtggcatttctcgagagtcttctgaggcaatgtcgtccagatcttgccaataacgacccgctcagacaatatacacttccaccagaagttcagccaaattcagttcccctagcgcaacacatcgagacacctgatcaacggcacggtgatcaatcaacctcatccagagccaaaagtgatgtcgaggaagatgacggtgttgacaagctgtcatcaaaggtcggcctactaagcctcaatgcagctggagcagagcctcaatatttggggtcatcttcgatttttgctttctcacgcctgatcaactcatcccttcgccaagtggtttcctctgactttcccacggctaacgtgcttgattggactgagaaccgctcttccgtgctaccatcaccgtgcttattgcctgcttacgaatcggctgtcaaacttagcgacatttatttccagaatgttaatacacattaccccttcttacacgagccgacctttagggcgtgggagtcgatgctactgaatgagtcgacggaattgggaattcttcttcccaattctgtctcgctgtttttcttgaatatggtaagagagacacggcctcatgctcattgaaatcatactcacagtgctaggtgtatgctgttggcgctttgcttttacccagtctcggattctcagcagaggtaagcagacatttcgattgacttacggaaagctgactggctcttagcgtttatacacgtcagcactaatgtatatcgatgatatcctggcctatgataatctagaagcaatacaagccatcctgtgctgcgcaatttactcacttaggtcatccactggtacttcgcactggtatggacagcatgaatacggggaaatgatgtttcgctgatggcatataggaaactcgctggtctagcactccgtcagtgtattgatctgggttatcatcggaatacaaagcaccttgcagcgcctaaagatctacttcaggtagagttacgtaagagggtattctggtgtgcctatgtcattgagactcaagctgccgtcatgctgggccgacctcttggtatcccttaccaggaggtcgatgttgaagtatgtttgaaattactagcccaaagacacgcattacgtgttgttctaatgtactcttgtgtagtatccgattgacatcgatgattcatgcatcaatgaaactggtcttgtgggcacgccacggagctccccaactgatgcaccaaccaatatgacgagagcgatccatacatttcgaattcgacgtcttttgaatcgaattcacacttatatttactcaaaagccgacccacgctactcaagaaagcacgaccagcagactgatgtgaagaatatacgtgccgagatcgagaagtggcgctccgaaattccacccacagcttttcaccccggtgaagagcttgtcttgtttacgactgcagattggtatgatctggaatacaactatacgatcctacagctttaccgagcccaaatcgtcgatcaccgggtggagactacagatgaggttttccttgattgtctgggcgctgcagagaacatttgccgaagctatcggcatcactttttaggaaagccaacgagatgtacctgggcagcacttcacgagcttttccttgcaggattgacatatcttcactgcctttggacatcacctgccgcacgacaggcagctggccacgggcaagcaagcagcacatgcaatgactgcacaatcgctttagtggtcatggctgaacgatgggatgttgctgcacccttccgtgagatatttgtggcgctcgctagccgaacaatgttgatgatgagtgtcaaggcggatgaaaatgtatctaaaaatgtggcttcggctgattccggtaattgggctgaagaggacttgacggagtggatgagaattgtggccgatgccggtgtgcttgagggctttaacggacttttgactggtttacccagcgaatgactctaccttcagtctatgcttccgaaggacatgataaaacgcgcgttgtgcgggttaagcgccgggaagtggggtccaggaaagagacttagggttggaggttgctagcggtccttgctagctagagacaagtgctcataacctaatggcgtatctgactacgttgtgcctgaaaaggggaaaacaactattgtcgattcgctaagataaaagtggacaagggagagagagagaggaagagggagccgaactatctgatggtgatctgggtccacatgggtgaccgccttccggtcacccaacatcccccctacagatctcatatctcctgttttgaaaatgatgatctagaaatgtcgtaatcgtggtagtcgtaaaaaaaccccaaattttcctttgaattaagtcatcccgataagcttcaagaaagctcggaattgctctttgggaagcgccttcgtaaacccgtccgccgcgttctgctttgtgtcaaccctcaggatgtttatgtgtccttgggccacggcgtccttcacgaagaaccatcggagtgccagccatctggtagcagacttgcctcccttctttgtcagtagcaactgtgaattgatgttgtcggtgtagataactgtgggatcgggtcttggcaggctcagtgagtctgcaaccttagcaagccacatagcatcccgggccggctggtcgagcgcacaccattctgctattgttgtggagttcgctgtgatcgtctgctttttagtagaccaagctactgggactcccgcaaagaaccagatacatccttcggttgatttggagtctgtccagtctgcgtgtgatgcgtctgtgaatgctatgaattgtagttcgtccgactttccaaagatcagtcctgtcttagggttgtgtctgaggtacttgacgacgtgtctcattgcctcgagatcagaaaaagtcggtgttgctagtctgtgttgtaggcgtgtgacggcgaatctgatgtctggtcttgtcttgatggcaagccagttgagcatccctactactgtctggtagtgttcgaagttctcgtcgtcgagtaggttagagtcaatatcttctgggttagactctctccatcctggtggtagtggtgtttctttcgttcccgcagtatctgtaatgcgtagaatcttttgtacgtaggcttcttgagacatgatgatcgtcccagcgttgtaatctctgtcgagtgcgcagttaagatactgctttggttctcccaggtctttcatgtcataatgtttcttgagttgcttcacgaccgagtctatctctccggaggtgggtgcggcaatgataaagtcatcgacatggatcatcatgattgttagatccgcgcagttctttcccatcttgacgtagacacacgggtcgtcctcgaggggtctgaagccggtttgtcgaagcttacagtccatctcctcgttccagaggaaggcagagtctcgtaggccgaaaagagcctggttgagtgtacatacccattgctttgaatttccttctgcgtctgcaaactcgaaacccgttggctgtctcatgtataccgtctccgcatcttttcttgatgcgttaaggtaagccgctgtgaaatccacttgacgccattcgaggccgtagactgcgatgagtgtcaagacaattttgatcatcgtttccgatacaaccggtgcgtaagactcgctcgagtcatcgcttttctcctggaagttgccgcagacaacccatcttgccttgaagccgtagacttcatctctcgtgttcgtcttaacggtaaaacgccattgtcctggaaggactttcgccttcggtggttttaggatcaacgtccatgttctcttcgcggcgaggtcatcaagctgtttttccattgcttccttccattcgttccagaaaggtgatttttgtgcttgtttaaaacttgatggtaggtcgacgtccttgtcgtgaagaggttttccgttgtacatgaaaggtgcgtcaatgtctacctgatcggagttgtctggcgaaagtttctttgcgtttccttcttgaggaggtttgtgtttttccgcacgcttgacatccctcttttgcttctcatattcgacgtttaggagtttttgtttaggatcctgatatctctctggtgggataccgatgttgctcctttttgatctcctgaccgaaggttcttgaatttgagttggtgctgctgttacaggttctgcggtaggtacgataggagtaatcttctcctgtgtctgcgtcagttgcgcagcgtgccgaggcgcttcataagtgtcctgcgttgatgtttgttgcgtagctatctgttgttcactgcgttctggagtctgttgagttggtgaagagaaaggatactggtactctgtccttgtctgttctggggacggagtgtcttcccttggagttgactctcgtggggagctggtttccctgatcaagtcctgttcaatcgagtctgcgtactggtgtacttccagcatgtccatctcttctgcgttgattctagctgtgagttcctcaagtcttctctggaagttggctttcctctctgctagcttttctgtcattgtaatttgctccgtctgaggggttgcattctcactgtgaacagtctgtgtctcctcttggattggagtaagagtctggttgactctttgcgctgttaactgttctgtgtttttgggaattggtgtccctctctgaagtctcccaaggatcgatcttgtgtgccttggtgcagggagtagcctctgtcgacgaggcattaccggggtctctggtatggttgaaacgctgccttgaattgtgggcaagtgaattgttgacggggttactggatcctgtctgtagactgttacaatctctgtccttggttcggttctggctgcgtcgatcagcgggatggaaatttcgtttgtgtcgtcatctcctgggggtttcgatggctttggcgctaccggtactcctccctcctgatcttcgtcccctggttgaggaaagctgacgtccctcgagattgtaatcttcctagtttccggattccagatttttagaatatgtccgttatccccctcataacccatgaggtgtcctttccaagatcttggagcggctttgcgtgcctgtactctcttctccttcggaatatgaacgtagacggttgttccccatggtctgaggtgcttcagtgacggatctgggttgtcgattccgagttctgtgcgccagtgtttgagtggcgatgtttgagactttgggttggttaatctgttgatggtgtagattgcagtttctactgcgtagggccacagctcctcaggtagcttagtatcgatgatcatcgttctctgaatgtcgttgacgtatccgccgaagcgttctaccgcgccgttgggctctgccgtgtagggtggtgtaacttcgaaagtcattcccttttttgtgccccaagtgatgaagttcttaaattctgttccaccatcgagtctccatattccggggtagcgcccagttcggagtttgattttttcgcaaaatgcttgaagcttgacaaatgcttcacctttgttcgtgagagtcggcccctcgagatatcttgttgcgtcgtcgaggataggcatccagtacttttcaccgttcgggccctcaggtttcataggctgcgtgtctacatgaaatttccatgccacgtcctgaacccgaaattgcggctcacgagaaatctgtttcttggatttaccttgaaaacatgcttcacagtcgaagtattctgttccatactgttcttcgtcgtcaagctcttgtgcttgtttcagcgttgaagtaagtttggcttttccagcgtgtccaaagcgtcgatgcgcctcaaaggcagaaattttattgactaatcctgtttcttcgtcactgtccgacccgtaggatgaatcttcttcgtgtgaatcgtcttctttaggaccgatgaggtacggaaccccgagtgatgtgtttgcaactccaacggtttttccagtgccgtctgtaagtcgcttagttcttgtgtcatacgagatatcctgttcttccaggagtttctgcatgccgaacaatttgccgtgaccccttgggctgtagtagccttttgtcaggaaggtgtatgttgttccgtcttcgagacctgctttgacaaggacctctccgtgtccttcagttaccactctgttgccggagtagtcccggtaggcgtatgccgattccgggctgtcctcctggtatgtgtagaaatcttcgaagtcgtgggtgagtgttttgtctgatccggtgtcaatcagccagctgttgaaactatctgtgtgacgagctgttgccgttatggccatattgcttcgcccctcgcttcgcagtgcgatcgagtaattccatacgtgtgggctgtgtgtccagtgtgcgggtggatcttctgacagataggaacacttttgagctttgtgtggcccgaaaccgcagtaggcacacatcccgctctcatccctttgtgttccttccttcttttccttgacatactcatggatatctttaccaggaggtggttggttgcgaagggtcttcttcttcttgggttcgttggatgtacttgagtcatccttcgaagatttgttgtcttggcttgaggaggcttcgctgttacctcctttgccgcccctcttaccacctcgtcctccgcgtcctccgccgcggttgttaccccgtcccctcgaggactgggctgcgttagcagtcccttctctgtcggaaactgcctggaggctcttgcaatattggtccatcttttcgagtgtgattttcttaggttcgatattactaatctcctcgatgatgaattgaaccttggatatttctttatccaattgccgtagaacttgtgatagtgcgtgaaaagggtgtggttgaattttgaatcgcgaaagaacgtggtattgtttctggtattccgcaatgaattccttcgcagtgttgaagtccgctcgtttcatttcgtcgaacttttttgtttcgtttagcgcattttcggccttgtcagagccttgcaccattaacatgatttcatcgaacattgtgtcggcgaattccgggaggtacgagagattctggattcgttcttggagtgtatcgtcaacctgaacgtacagccagctagccactgtgcgtgaccagtactcccatctgtcaaatttcgggtcacccacagtggggcgaggcatgctgctgtcaatgacatattccagtctcaatggcgcgagagcgaatttcacagggatcgcccatccacgaggatttctggaattgtactcgagtgctttgactttctgcattttcgcagccgagatgtcaggtaagttagtggcctgattcttctcgttgtatccgttacccgatgacattgtgttggcctggggttgagaggtgtttcctatctcccgagacgcgttgttattgcctgatggcaaaaattgtgactgattattcgggttgtcatccccagagtcgacaccgctatcagccatgctgagagctggtttgccaattctgttgttgattcctttggacatcacctgccgcacgacaggcagctggccacgggcaagcaagcagcacatgcaatgactgcacaatcgctttagtggtcatggctgaacgatgggatgttgctgcacccttccgtgagatatttgtggcgctcgctagccgaacaatgttgatgatgagtgtcaaggcggatgaaaatgtatctaaaaatgtggcttcggctgattccggtaattgggctgaagaggacttgacggagtggatgagaattgtggccgatgccggtgtgcttgagggctttaacggacttttgactggtttacccagcgaatgactctaccttcagtctatgcttccgaaggacatgataatggcgtatctgactacgttgtacctgaaaagggaaaacaactagtgtagattcgctaagatctaaatggacgagggagagggagagaggaagagggagtggaactatctgatgatctgaacccacatgggtgaccgccttccggtcacccaacacatgagcctcattttgtatggttgctggaatttaactacagcccaagttatcaaataggtttatgcgaaatggtcataatgatatctctaaaatacggattgttgtgacgcccccaaacagagacacgacgatgcaataaccactatgtgacatgaaacatttcgaaagttgtttggaaacgcgcagattcttcgctgtgattgacatgtgatcatctgcctcaactgaacgtcccattagcaggcccaaaatacccgacagctggcatcgacttgtatggtacaccctgggcgtcggcagtattcaagtacacgttattcccccaccagtcagggaaagtggcaccagggtacgagatgcaaaagaaaataacaatgccactgagggcaagacctgtatcaagggcagctgccaagatataattgtacttggtccaccaagcaaagaatcggcgtttaataaagtgattgaaggcaaagttgaccagtgcccagctggaatagttaattccggtcgctaaaaagcatttagttagcttttgaaataaagaggcactggcaagttgcgggacataccaggtgggacgttgtaagttccgacgaaaatgagaggccagttaatatacttccaaaactggcgtctagtataacggtagaggaggaaagtcacaactggagcgacagcaccgatccagaagaagtgcaacagaggggaatagatcttgcccacggagtaaagccgacggggcccaacaagaccccaaataacagatgaagaatagacagtccgaccatttggacaggaaaacccatccgtctggccagattcgcaaatatccgaaatattaccaagcatccaaagtgtaacgccggcctgtgtgagtgcgcccaggatagttgccacaaactgcgctacaaagcaggtacgtggcggcactttcagataatgagccaatttcatatccatggagaagtaaacaccctgtcccacgacatccgtggaaatgatcttgaaaatcatattggcgagtggctttccttcgaacatatatccaccaatgaactcggccagaacattcagctgattcgcatccacgttcgtaatgccctgtacgataccgcagggaaccatgtatacaaccgggatgatcaaggctagaaagactccgtaaacgggaagcttagtctcatagacttcgaccatcgcgatggacattgccatgataaccacgataatgccagcgtaccagtaccacggggtccgccggtacgaggcacggatgagccgagcatgaatatcgagcttattccggcctttgagagcagcccacaggtcgcgactatgccagagggcgatgtgcgagaggactgaggttatggcagcaaatgaaagtccgtatacaaaggcaaacgttgcgctcaggtatggaggcgagtacttttggtaagccactgtatctagagtattatccgcagaaatgactcgagccgtgtcgtagatggcgcccgtgttatcgtacacgtcggctgtcatgagtgggagataagctgtgaaccaggtattggtgtagtaaagggcgggtgtgacaatccagtagaagaacgcgaagccagcaaagacattcaacgcagcccatgatggtgataggagcgggttggtgttgtaggcaatctggctccagtcgaaggtaattggacttagaccgagacctgtctgcatgccgaagagatggttgacgatgacgttcttcggtgcgatccagcagacccaggtgaaataggataacgcagtgaatataagaccggggaaaaaataccagacaaaggcaccggtcataacgtacatgaagaatcggagacgggttatgcgccatccatctgcgatcgagttcgctcgcgaatgcaacgtttctagcatagcacagttggataatacacctggccagacgatgcgagccggctcgacgagccatggagctgcgagacccgcgacgccaaacccaagaagttgtgcgacgagaacaatgagcacgtagaagccgggcttgagattgaaattgtagaagttcttgctggcagcctggataatgtttgtcgcgtccgctgaagcatacccgaaggacacattgctcataatcacgataagcgcgtgctctttgatattaaacgacctgtctgggttgacaacgaatgtgcccaaaggcccgagtcggatggatgtgagaggaagagttttggccaggaacaccccgatcggataggcaagtagctctgctactagggccacaatatgaaccgacggatagcgcagcgaaaagaactgattgataccagatccgagcatagtgaaaacaatgcctaggagccacatccgcaccgtattgactggcatgctagggtcatccgtctcggggacgacagccctaactgtggtcactgttagtcaatcgacatatatatcaacagtgagctgggtactcaccttcagggaatggagagcggtgcgactcatagctgaactcttcatttgtattctcggagtccttttccagattgatttggtctgagtggccttcgactacctcttcgtcgactccgacgagagcgggtttgattgtgtcggaatctaactttttggaatacatggtagaaaagtttgcgcagtctcagcgcttttgcgaaagaaaacaaatggaatacagtgagacacggcgccttttctaggctgattaaattggccatggcggggacgaatttagtccgacgcgtactgaggggaaacagagataaggcattctgacggttggctttccggtggagagagtgggtttagcttaacttgacttaccttagcttcagatagtggactgacccctcaaaaactgtcctatgaacaaagccactagtggttagcctacattagtttgctttcaagttgccgacgaaagatagcgatggcaagcgagataagaagatgaccaggattgagtctgtggccgagcgcaaagccctagagaggcttagtccgagacaaggctcgagaactagaaagtaaaccggtttatggcaaagactccaggccggcagtgttatcattcagtaattcttgtgcaacgaagcacatgttttttaccctttctttaccatgcaatggacattcaacctcgtatccagaggtttcggagtccgactaggactccaaacatgatacgccaagcttcagccgcgggccaagtccaatcaagctttgcactgagtaagctccgttcaaaggcaccaaagccaattgacgacctcaaattcattttcttctgtatgaatattcccttgcggcaactcgagacaccattgtagtgtgtctcgacatatcagatccatcctttgaggaaggatatcgacagcacacttcacaatgatatcccaattactcctcgctatggcagattaaacaaaactgctgatttggcctcgataaaagctgttatttatatctggtctcgtcccatctgcgatttatctatagttaattatgagtttttactccgtggtgtacgttgtagtacgcattgggtgattctggccatgaagtcactacatggctatgtacaaatgctatgagtctagtgttcaaaggccattaattgtactcaatggtgtatcaccaaggctcggctgagcggcctatgcggtcttcgtactggcgatttgctcgccaggtcaccaggtcgcccgtattggtaatcactggtaggggtttactagtgattaccagtagggcatagggttacctcgacctagtaacctgatgaggtgaattcttctaaatgccttattgcagagcaaagcgaagcaattataaatcagaggtcgtacgtccgtacatgtcaggtggccaaatacttaaagcattggtagttagaatcagtcgctttgctctgcaacgactatctcggcggccgcaggccgacgagatcactggcaattcccctcaatcaaggccggtgttgcttacggccgacattatgtgaaaggacccacaatcgcgtcagcatctgcatcggtatcacgtacgcgactcatcgggagctaacatataatcatctttgatttagttatcacactctgctctcatgatacctagttgctattacgtgaaatagtaatggaaatcatctctatggggtttactcatggcaacctgcggtaagagcttgaaaacctattaaagagcggcctaatcccagcttagcacaagaaaaacatcaacgaacgttgactccatattgtcccatcccccttgaacaaagccgtcccagaaaaccatggcgcaattcggattccacactacctctgatcaggctgcagaagctctaaatgcgtcgattcgcaacaagactagtaagtttcagactaaattgtgagccccggagtttgttgctgagaaactactctctcggtcattattaccggtgtcagccccggaagtctcggtgcagataccgcgcgcgccctggtggctcaccaaccagcgcagctgatccttgcgagccaaagcgagaagatttgtgatgttatcgcctctctggacataccgtctgagatagtcgtccgagcactctgcctggacctctcatcccttgaaacagttcgcgttgcggcggcgcaggtgtcggaatgggtagcttctattgatgtcctgatctgctccgctggtatcatggcgacttcgacctaccagacttccatggacggcttcgagctgcagtttgcagtcaaccacctgggccacttcctcttcgccaacctacttattgaaaagcttatggctgcgcccggtggtccaacagtggtgaactataccagcgaggcgcactcgcgcgcgcaaatggatttcttggacgacctgtcttatggcagtcatggcggtaattacaacaagtggctagcttacagcaattccaaggcctacaacattcttttctcggtgggtttggtccagaggtttggcgtgcaaggcctccgatccttcggtgttgacccgggtatcatcgtgacgacttcgttgacgcgtagtgtcccaccagaggacttcatcgctctaggtgagatgcgtacccgtatgaagtattcattggtactggcggcgcttaggtgttcttggttaggctaggttgattaacagggcaaactgagctccgccataaaaacaaagacttcggcagaagggtcatcgtctgcgatcattgctgcctttgacaagtcacttactagtaagtgggattgatatctatggtgttatccgtgacagtgggaagaagattactaatattttgatgaagatgaaaaaggatatttcgtcgccgatggcattctttctaatagtggcctaaaccatgatgccgtggacccagatatggcgaataagctatgggaattaagcgagaagttgacaggactggtatcagaatgagggtgatggatggttcatcatcacgtggcaacgatagcccgtcctgatgtatcatgggtactgtacaagaaatgcaagtttgcactgagctattactcgtcagaggaacggacaaagtatcgatataaaatgccggtcttgtacgcatgttgaataaatccctgttaaacgcttagtagttaccgtagggtgtgacggttgtagaagaactacgttataaatactttcaagaaaattgaaaaatcaattcatgtgggcttttttatagtactgattttttactgacctcctaagataattgatactgaatctctgtctgccagctgccaggtctgtgcttgtcgaaaattgcagtaattgctgaaaggtctcaattgaatttattgaaatatcgcccttctaagttctgggtattagatagatatttaaaccaaaccgacaccgaagatatcatcatgactgtggcctagggcgttttcttactctagaagagtttctcggaggatatcttctgcctctctatatcgtccgttcacatagaggcagtatccagtctcagacttgtactcgagttcttattcttgttgtatcactgtagcctttcctcgggctacgtctaccagctctgttagggaagttgaaataggtatatcgtgaataacagcctccaccactcgtaaggaagcttttgcagtgccgatataatcaattgaaaccaccaagagaagctccttcgcataggctgccgctaccgccgccgtatagccttgccattccttactcttgtgtgaatcggcgtagtcatagataccccgaatgaccagatatggaaagtcattcataagtcctgccgcctccatttccatataatatatccctaagtcctgagccagctgatctcgttacttgccacctttcacgacttgattagcagatccaattagcctgtaatagacgactggttctgtatgttctcgtgagggtcatagacatagtttagatcgatcgcaattcacacatgtatcgcacgcgatatattagtggaggcttcgctggcagaaacaccacctctgtacccacaatgcccaacggtcaatcacgtactgtaccgatggcggaatactttatcatagttttcatccggtaaagcttggtccatcttcttaggacataagtggatgaggaagtcgggtttcgttaccttttttgtgtcgtagatgacgtccgaagccatggtggggatactgaatgttaggtttggttgcaatgcttagccagctagccgagcaacccatggtttcctttcccattactttctctacctagcttgctggaggattgattcattcgcgatttacatgccgtctactactcgaaagatttgcatagtcttcgttttaatgacgacagtgaaagaatcgtatgctgaatcggctgtgcttgctcccgggaagcgttgtgtagggtccgtacttgacggtttctatcgtataacacgaagtgtctttggagatctttcttcgctatgtgctccattgacttgactgtccatgtggtgcttatgtcgtacttatggagtgaggcgagaccagattattagcaaagagaaggcaccaggtccaatgagaaataagggtccggaatgatattccgtcagatatgcgctaagaattgtgggcaaccgcatgcatctggtaacagactacccatgcccattgttaacgaaaatttatccaactgatctctgacagcatagatacttaaactcgggtctttttgatctcgagaaaggagtgattgattcgtattagttttgagagcctgaactcctgcaaaaagacgccatgggtcttcctggtgcttatcatcaaagtctgccatcagaataggattggttttcctatttagatgggacttaagcaacgtcattagctggtcgagcagtgcgacagcagagttaattccatcgcgagttccctgtaccagggttgttgcataagtggatggaatcactccaacaaaggacgctgggggatccgtttccatgagcatgccatgaaactgaacaagactttctcttgatttgagaatacagctcaccaggccgttgagaatggatcgatcgacatctgtgtccgaagtcgtaaagtattttgtcattgcatagtagccagggcatttggctacttcgttaaatgcgtagtccatcgtctgacctaggagactactttcctgccaccggtcttctgccctggcaatctcttggatcgctgatacgcacgtccactccgaaccacctagaaaacagggctccgcatggataaaggcatctgcgactaggtaaggccgccaagaaatgagaagagtgcgacccatgccatgtgtatgtgctgaagggccacgggcgcagaacaggtggcggatgccatgtgaatgaatgatccatgagcgatcactactaccatctagaacctcatagccccctagcaaaatcgcagctgcaagtgtttcatctgctagtgcggcccgtgtatgtaggagagaggccagatggtttacaccccgaccatacatatgacgagcgcacattatggcttctttattgcctcgtgccgcccccatgcgcaaacaggttaaggcgcggagtgcccagatcagtgcctggggaaatgtggaccacctgcctcgtataaacttcatccaattcatctccacgcgggagttgaaggaagcgaggtaacttggaaaatggtagtccaaccatacttcgaatgattcctgcgtttggacattgatcgcctcgtaggccaaatttggagcaaaggcttcgtccattgttggtcgaccgtgttttagggtgatatatcgcgtctggtccttgaatttgtgaccacgatcatagcctgggcattccgaaccccagttaatacaccgcagacattccggacgagttttatcgcactatgtatcctttagttcatgttaccggctttattttgagatcgcctcttgcagaaaaaaacggatgagaggtccggaatgacatggtaccgcaatatatcagcactaaccttgaccttgcggcttatacactgcaaacatcctttactatgagggacgcccggcattcttgttctatctggttgtcccagagtgcacaagatagctaggaactaaagggttaatagtatgaaattctacctccaattggtatatgagatgggaataaggggctttcgctacaccgctccggcagaaaatattaaaagctcccgaagtccaccttgaggatttaattgttattttgttctaatttctcagaggtcacataatcccatagtagtagatgagcatctcctttcctcccgtctctctttcatggttcaacacacaacggttatgagcccggggagctcgtcattgatctgatcttacaatcggtcaatatcctcggttctgtgtggatctctctatacaggggtctggttgtagtaggccgtggtgtccccgtctcgttattatatggagaaggcagagccataatcgagcgaatgagtgattctcacccagattctcacccagattctcaccctatctatatcacacagtcatttgcaatctacctataattctctcccacacattatctaatacatacgaccatagggtgtggaaaacagggcttcccgtccgctcagccgtacttaagccagtagataatacgccattaagtaaatatgacgattataccaccaatatagggtcctaattgtaaaattagccactgatatccaacgatacatatagagatagtgatagtctaaacataccaatcgcaggaccactgacagatccaaccataaagcagtcagcagccgtcccacgcacagtctattaactcccgttagtgtcacgattggcctttgcgggactctctcataattagcctctaaataaaacatgatagcaagcccatcatgcaaagaatttcgaagtcagaggaagcacacaatagaaactagaaggggcccttttcacatgcatctcagctaccttcgttaacgtatcacgtagggcttgtcacgattggcacttgcgaaactcgtactttcccgttcgggattgtaccgttggtcgttccttcctgttcgagggaactcgtttgcgcagacagtcgtaccttccttctgggataaatgaggatagggctttgcccccgaagggttataaagaccccattgttgtttttacatttgttttcttttctttccttctccatacttgatattcgattagcaatgcacttcttttgttgaaaggaacctggcacgtaacagttagtaaccagaagacaatcggaatcaaactaatataccggttcaaagatatccgcaagaatagtctatccagcaaccataaagaaggtacccgtaaagcctcccaaaatacgtattgcgatgaatatatacaaattgatcgccgcggcggtactagccgagcatgtataaagtacaaggatagctgtattataggtattgcgacgcccgaataggttggtgatagggccccaaataaaagacgagaaccctatagcacttagtatacatttatacagagatcagatgaagggtaatctcggaatagtatcgggccgggtagatcagacgaattgatcaggtgattgtaaacgaaatacagggcttctctacataacttatggagatcacgtgattggtgctgcagcactcccgtcgcagcaccgcagcaccgaaccaagggcctggtgctgcggcacttgtcaaggcctacttagtagtataaaccaagtagacaaacccggcggttatctataagcttaatatactatttatggaagacgaagccgccgctatagagtatatccaggactagagaaggaagatataagaagaatatagaaggctgtttaatataatacaggagatagaaaagaaggttttcgggataaaatccttcttccggaggcatcgtctaggccttttaccctgttagggttaccgagagggttttagcttagttaactagggacggtcaacttctcgccggggggtatatagtaaagacacttagaacccctatatttataaccttatctttcaggtaggaaggacataaggcctagctcttaagtaaagttctagagggacagtattagagaatcatcatcaccccggaaatgaaaaacgagttacgagatatctatacaataggagattatatactatggtgtgatctatataatccctatgcttactagctcaccgtcctagatggttggtattgttttgtcgttctcgtcttacctgcttggccaggctgcccatcgtgcatatccctcttcacttggtatattagctctagagttagccatggatgtcttccatggttggcaatcattagtggataccttggcatattagcgccttttcacccaactatgattggtccaggcaatgacacgaccacgggatgatggatcctttccacgccctgcggatgattcctctgtgggttggcagcttatctttctttaaattggctcctgaaaccttcctaggtttcttccaggttcctccaacatgtttcttatggtgagctaagcatttttgaattttctagccttggaacagttcacggattctgtttcgtctcctaccggaatatttccctactttttcttttgatcgccgtcgaccctggctctgagaatcgacgaagtaatgggctcatactccccaacaaaagagactgaaaaggggcttcaagcttcgctagaggggacgactgacggtactcacgtgtcaaatgttgactatggcacgcaactcccccccatcgatggcggaatgaatgcctggctgttcctcgctgcctgcttcgttatggaggctctcgtctggggatttgcattcacgtacggtgtcttccaagcgtactacagcgatatcccccaattcaagggctccggcaatatcgccgtcgtcggaacctgcgctatggtaaaaattgaatatctcatcttctaacccagcccgagctaacgtacatactccagggaatcatgtatctcgacctccctcttgtctttgccgcctaccgacaatggcccaaataccagcgcttcggctgcggtctaggtgtgctactaatgtgtgccgctctcggcctgagctccctcgccacaaatacaaatcaccttatcataactcaaggaatcttctatgcgctcggcggcagcatcgcctacgccccctgtatcctcctaatggaagagtggttcgaccgacgaaagggcctcgccttcggcgtcatgtgggccggcaccggaatcggtggtgtcgtcctccccatcgtcatggaacagctgctgggcaagtacgggttccggcttaccttgcgtggctttgcagtcgcgttgtttattctcactgcgccgctggtctacttcgtcaaaccccgcgtgccgatcgcagataacctacccagtccgccacccccgaacttccggttcatgtttacgtccacgtttgccctcttcgagttttgcaatactatcgaggcgctcggttttttcttaccatctatctacctcccaacttacgtacgtatgctcggtgcctcgacctccctccaagcactgactgttatcctcttcaacttggcctccgttgtcggctgcgtgcttatgggcgctatcatcgacaaactcgacgtgacgctttgcatcctcgtttcaactgttggatcctctatcggcgttttcctcatctggggcttctctatgtcccttgctcctctgttcctcttctcaatcgtatacggtctcttcgcaggctcatacaccagtacctggcctggcattatgcgcgagatagtccgtaaccagccttccgccgaatcaagcatggtctttgcctgtcttgcagccgggagaggtgtcggaaatttggtttccgggccccttagtgcggctcttattaaggggatgccgtgggagggggacgcagggtatggatatgggagtggatatggatccttgattgctttcaccggagttacaggcgttgtgggtgggggaagttatgttgcgaagcgtatgaagtggttatagcctctgctaactcactattgtgccctaccgacgtggtggatattggtggattatctgacaatggctgatatacgagcgcctctagcgatattttaaatcttggagccaaaaatacatgtgttcttagattctagggagttgatgactcgaatagcaatttccaactttaacaatcatccggccatatccgtcgaaacgaagtgccatttcaggccagttaatcacagagatggagcgagacagatcgccattttggagtatcgacatatgtggtgttgaccaaaacctccatcaccgaaatggccttatcaaagatatcaatcttcttatggcctatacttgttccatttgaaacaagcttaaaaggtacatccgtgcactatcggcatctcagctgtcaacgatctgcgcatgtacctggtatgaccgaatcacttggccattcatctgatcctccatcaacacaacacggtcaatcgaggtgggtttgccgagcctgatggtatactggcccttttcattcgaagagtgcatagcatcacttacaataggcttgctataccacgagctgatgaaatcacctagttgcttttaacgggctgcgtgttcctttggtatagctccgcttcgatcaggggaaagatccaactcgaggatacagtttcggcccatggtcttgtgtcttcttccttttatggcgcaaacaaatgcagaaataattacaagctggacagcactaaataaggaactagtatgaacattggatttttgaccgaattctctactatagcagtagtcagtgaataatatgatgattgaatagagaatttctttttttagaaaaaaacatacaacagtgaggattcgctggtggtcacccacccaactactaactcaccggcgnnnnnnnnnnnnnnnnnnnnnnnnnnnnnnnnnnnnnnnnnnnnnnnnnnnnnnnnnnnnnnnnnnnnnnntaagtacggctgagcggacgggaagccctgttttccacaccctatggtcgtatgtatcaaactgtttgtgggagaggtatatagaacaagggtgaggaaattgggcgtggaaaggactaagtgcaacaacaataggcagagtgagggttgggtgagaaatttcgggcgtagaagaggctaataacatataagtggaaggtgatataatggtaagcgccacttaaaaatcacgcgaccggaggtgacaagggtgagtgcgctatagacggggtgagaagccaggtaagaaatcacccaagtcgcacgaccaatgcattgaccctttcagccagacgaaagcagaatttcattggaccgtgtcgtttcccttgaaacgctcggcatgcacataactaaaactggaagcatcataccacaagtactacgcctgtattgacgccccgattggtcaggcctgggccccctcaggatatgtatgcggactgtgcaaaaaaataactagtctatgggaccccgcaccgtctctttttgactatgattccatatttgagtcagattttacaaagacggccatgaacagcctcaagcaactcaaaactgagttcaatgggcttctcactcatacccagtttctgctatagcaagatcgtgcctcgttctccaacactctcatcttagcctcgatttctgatcgcagaccagccaggaaagatcattgaggcccgtggtaataccttcggctcctttacagataattgcgggtgttctgaattagcttcaatcttcctgggaatgccatacaagtaccatttgtaagaacaatgaaccacaaggatttcttagttaaaccacgagtaacttcgacttgcaatacccaaggaaacgcaaatatccgattatttgttcttcacaataatccaagacagtcgtcttgagctagttgaaggccgaccaccagttctcctctctgcattgtgccccttaacgtcgtgccttctcaacccacccggggaattgtaagtctttgaacatttcgtgcaatgcaatggcttttttgacgctgctagcctgggcatttgggtctgctgctgtgttggctttggccggagtggtcgaaagggactctgagcaattttactcgcagatggtacatgctcgatttcatatgcaggaactgactgtagtatctggtcgttccactgggcttctataggctggttagcaagtcaccgtctccaagtaatcagggcacagagtacgaacgagaggaagtattgatcgaacaaccattgattaaagagcattgattgaaggcttcgtgggccggctgaaatggcaactggtgcaaggcagcggcattgtaagcgtcaaaatccaacgcggcatctctagtgaaagaagacgcgacgtcaagcttgtcaccaaccgtaccaggttgggagtacactgtgggaagtataggcggctggaaaaaacccatcatccccggttcaagatgctcaatttccattgggttctggtcctcgaaccaagactcagtataaaatttgtcatcatcactacccaaaccaacattagctctcaaccactctccactggttattccctcgtccgaacgtcagcaggagtgtcgaagacagactcctggcggggagaagcatatggctgaacattacgggtcataatgcagcaggacaggcggggattatgcaattgcattgcaaggctattttgcgcgcgtgatacttgatacgtagatacccggaaaggcgactcctgtccttgaggtattccattgattggatttatctcttttgctttctccccggcttgcgctagcctcattgtccttggcgactttgctgttacctgaacgcctttccgagctggacatttacagtggatagtcatgctgatccaactgccccctcaacacacatttctattgcggccataagaaagctttaattcacgtcgcctttgatattgtaactatttgccgctgacgtgtttgaggtatatatttcaagtcgtcgtcagtaggaagatcactaacaattccggaatggctgcggagacgaagtcaaagttacttggattctcgaattcttgttgctaatgataaaaagaaatcagctccgccaatgtagagtggtaaatacaaggcccaccgtggttggcatgtcctgtggattgggaaaaaatgccatgatgcgattgagtcggccgaagtaggagagacgatcaagtctgacaagtcagccgaagagccgaccagatagcgaataatggaaagagatgggaaggtaaaaaagagaacggtaagctcagtggataggacaagtctctgagtgcgatcggggggtatctatagccttgaagatggtctgtgcggcaccgtgcctcaggcagttgttcagagactcgtgcgggacgcgaatactcagaaatagatggccaatatagtcgcagagaaacgcacgagtgatgatcatgctgaaatacaacttgtcgatgtacctggcggaccaatccaaaattcgagaatccaacattcgggcttatggttgggtcattccgcagttgacggttgcatgtaagacagcacagactcgtacgaaggtgtatagcggccaacagccggatgcctgattttaatggttttatagcctaattaggactagctcttaccaattttagaccggcaggaaattaaaatacctgaattactatgacagatctcctagtaccaaattgagaacagcttgaaagttgaaacatgaagctattcatacccccccccccccccccccccccccccccccccatctnnnnnnnnnnnnnnnnnnnnnnnnnnnnnnnnnnnnnnnnnnnnnnnnnnnnnnnnnnnnnnnnnnnnnnnnnnnnnnnnnnnnnnnnnnnnnnnnnnnnnnnnnggttaaaaattggaaaaagaaagtttgcataccccccccccccccccccaaaatactatttctcatcgatcctaggcgttaaggccctccaactatatgaatctcctgtatttaaagccattcatacccgccgtagtcccgcactttcccggagaaaagctaatagcgcaactgacaccaaggcccaaaacggttggaaagccaagcctggatttcaacacaaagtccccattcctaccgaccgtataaacttcaaactctccgtatcctctggctccggcgtggcgaatatttgaatgtagttttgagaattaaaataggtagaaggcatttgaattaccccatggtaacagtttcgtctcttcgatgtgtacttacaaaagatggtattgagcggtgtcaaaggcggtctaaaactggtaagagctagtcccaattaggcgataaaaccattaaaatcaggcatccgactgttggccgctatacaccttcgtagactcgcaataaccaatcctgtggccgaaaatcaaacccttcttagtcgctgttatcgtggctcggtcgatcatgcatcaacgtgagacaccaatcctggtggcttttcatctcacgtcatgggcagcgagagttttctgaattcgcgaatgagatattcgagaattgaacacgatctcaatagcgtcagcgcaggcaactgaagtatgttcgattccgtcgactgatctggcaattttaggtatctatgcgctggcagctgttggggtacagtcgggtattcgtcattctgtgttttcgcggttattttggcctcagctaattgtaggagaatttgctaggacttgtgtcaggtttagcgggacagattgatacctgagtataagatgcctctatgatcccctctaatggcattatctcccgccttacagtgctcctctgatcgttggtcttagcctgagatacgcgcagttgttcttcactgccactgaccactcaaaccactgtaagtaggggacttggctggtatcacttccaagctgacaaaatttagacaccattgcctccatctctctcaatatgcccagagcaatccctcgcatgttctcacgggcgcccgactgctgcggcgctcagatgtctcgtcgccagacaagcagcaattataacggcaatagggacagatggcgttatttctgccgaaattgccctcgtatggtctttgatgattgggagggcattcgagatgggaatcccttgtgtgactgttcggagttttctcgtgaacagatcgagcatggtcgtgtttttgtgttccggtgcgcgaggaaggattgtaaattcaaggaagaggaaactcaatgattggtaggtcctgacactgcgcgtgggatgcaagtagcgcaggagcatgggatgccgtcaatgcagaatcttttcctatatactaaatgtcctggcatttcgaaaattcaattcgcattttccgaaatgcagacgggcaattgatttctgagacgtacgtacggtaccacctacctaactatggtgtacatatattctcacgtcgcttcgggatgctctcctcttaccacccaccatctcccgagttttgtcgattccaaatcaagttctttcatgatcttcttctagtgtctttcccaaattgtactccatacacattgacgagtggctctagtcacgccagctgctcgctgacgagtctcatcatcagactagaactttagcggtcttgacatgtcgcagatctgctaggttgaggcaagatcctgacatcgttatttctcaacatattattgcttcccaaatttccctttgactactgtgatattgacttctccggattccaatcatgtccagtcttcacggactccttcatcgacagcgaccaggaccgtggcagagattccgggcccggccttgcgtcttcctcgcataaatgctttacagttggcataaacctattccagctttgcctctcacaaacattcctgttgcgattatctgtatatccgatactcataacaccaagccccacgttccagatggtgacatccttatccatgctggtgatttcacacagtctggatcttttcaggaacttcaggacgcacttgcctggctacgcaacctaactcatgctatcaaaatagtgattgctggtaatcatgagctattgcttgattcagcttgggatgattcgctaggtcaagcagcctttgagcgagctcaactcgactggggcgatattatctacctggaaaatggggaggtaacagtttcctgcccgaattttcgccagcttagggagttcgaccaaggctccatatatgtggccacgtacatgaggcttcaggaaccgagtggatggtgtttaacggactccaggaggcgtacgagcgtactatcgctacagaaggaggccttaagaatcttctgcttgcaacgtgggagttaaccaaggcaatatatctccgcccggttgtagaggcaaaatgtttacttataaacccatctattgttggaggtttgtgggtttgtgggacaatgaacggaggcagccggtcaatgtctttatataatgttgcaatcctgttgttcaactgaatttagtcctgcctctcttgcctttcaactgattctccattgactccgcaaatttatggttaggtaaatgtggttaatggcgtattatcgcgatgggatattgagtaccgggccggtcaatttcgacattctaggttctctcatgaatcgcgctgaaatgcgagagagctacctttcattacttattcaagttacatcttctatccaaagtcggccatatctgtgtttaacccgggaatactcgcaatcagattctcctgatgaacctcctactccaacacagagcgtcctcctcttcccctaacacctctatccttcaattgaattcatcacaccccagtcaccctccgtccaagacagcgtcatcttaaaggcctcaatcttccacagtccactttcattatcctttaccaaatcagcatagtactgcgccccagacatcagccgtggctgatcgggctcattccccttcccaccgcggtagtgctgcgcgagcgcagaggcagtcgccgcggccttaacgccactgtcggcgatgtttatgcggatgttagtgacgaagtgagtggtatccagcttgctgatcacttcgaaacagtcggtgtggatggcaggaaggcccgagaaggtcttatcgccgatagagaatgtagcggtggaggtgaaggcggagtcaaagagggccaggtcattcgtgtctagcccgaggacgcagcgatagagtgcatcagcgatggcgtcgcggccgctcagggtaggtgttagggctgcgggcagggagaaggatgtcatggtaataatagatgatatgggagtaagaaggatcgttggagtgagaattgtaggaaaagccggggtattcctatcaaagaggaagcttggcgttgaggtgcgaagcgatttagatatatagacctcgatggttgttaactccgctgaaccatttatctccaggaatccatcggagttaaggctatctcggacattaccagcggtctcatatacagtgttatgtgctgagcaggtagatatgaccttatttccccacctggacttcctttctttctctctcctagctagcaattacaacgacatcttgcgaattctggcctcggataggcccataaggcgggcagagtactaaaagagaaacagacaaccttagaagccaatagttcggtcttctaatgcaacacatggggagtactattgttagtacatcatacacgggaacgaggcctgctaaatctccttgaaatatttgcagaaggtgcaagcttaatctgagcctacctagtcctgtttctcgtactgtgtaccgcgatatatttgcagctgacgccggcaggcacacttgtactcctgtccctggttgattctcctcctcctactcctcctcctcctcctggtgctgagggaggcagagaagatgaacatgacgatgagttgagtcctcgaccaagaagaagaaagcggttagtcaagtaatcttcattggtatcttacatatctcatttttttgtaaaacatgactacgagcacattgactatttccaacatctatatcacaatagttgagctcggcattatgataaggaaaagttaaaattttgctatttgctccctacttgagcagttcaagttttacagctctgacaactctccaacacatgcatcatgacgtggcccgtcttgtagacctctattgacaaaacaagtttactaatagtaacaacctcatcgataactaactacagagccttccaaatattaaaccagatgcttgataggtagttctcatacattgatcatgtagaataaatcacctgaccacggggaaagcagcctagtccaaaagcggttagtggcgattcagctcttggcactcacccgtgagttttgcgtgtcgcgaccaacctccccaagtgcccccagcaacccgtccaatcatcactttaggtctcctcttccatctctcgcggccttcattcacgccattactggctttttactgtttaatcgtatactaccattgcgctttacacggcagacagactgatacggaaagaagttgacattccgccgaccgcgacagctgtttgccttgatccatcatggatgacactcacatcaaccaagctgcggcccacgagaatgtccagtctatgactggcctagatggcgcagctgatgcagctcgcggagcctctggtatgcctactctcaaatggcttttatgttgcaccgagtgctaaatttgtggacaggagcgcaatcgcgccagaattcgcccgtgaagaagattgagaatacacctgggtccgacaatccgatgtacgccccagcatctcccaaacctcgccacggcggggttgaaccggaagacgaagagatgggtggtactgagaccgatgccaagcccgacaccgaaggcttggaggatgctgcgggcgagtcgcatacgcaaggagagggaacagatgggcttgaagatgctgtgggtgaagaacaacccgcaccatccaagtcgtctctggaagccgccgcgcgcgaacaactcgtcacgcaaacacacgccatcattctccccagctatgcgacctggtttgatatgaacaccattaacccaatcgagaagaaagctctcgccgaattctttaatggccgcaaccgcagtaagacgcctgctacatacaaagattaccgggacttcatgatcaatacctatcgattgaaccccatcgagtatttgactgttactgcttgccgtcgcaaccttgccggtgacgtctgtgctattatgcgtgttcactcattccttgagcagtggggcttgatcaactaccaggtgaatgaccgtgttttcccattcaagcatcttatctaacatctctgcaggttgaccctcagacacgtccgtccaatattggcccgccattcaccggtcacttccgagttgtcgcagatactccacggggtctgcagccattccagcctgggccaaaccacagcgtcacgtccggcaagtttcatccaggcacacagcgtgctgtctcttccatccctgcatccaaagacgacctcaacctcgaactccgccgcaccatttacgatgaaaaaggcaaggatatcacctccgccaaagataaagagaaacagatcaacggcgaagcaacaaacggcttggacattgctcgggaatccaagaagaaggcacactgcttctcttgtggtattgattgcactaaacttcgattccactacgctaaatcggcttcgacatcagccaatgccgctacgccagacaccaagtatgatctgtgtcccaactgtttccttcaagcgcgaatgccttctagccacaatgcctcggacttcgttaagctcgaggacaagacctactctcacttcactgacaaaaacactccatggtcagactcagaagtgattttgttgctggaaggcctggaaaacttcgatgaaaactgggaacagattgcgagccacgttggcacacgatctcgggaagagtgtgtcatgaagttcctacagctagagatcgaggacaaatacgttgaagatgtcccagagccgcagttgggcagcggacgcgaccccatcagccagtcagaaaaccctgttctttctgttgtggctttcctggcccagatggtggagcccgcagtagctgccgctgccgccggtcggtccgtcgacgagatccgcaaggagctccggagccagctggagaaggggcatgacaaaggcaaagatgcagtcaagtccgaagattctatggacgtagatcccgcacgtgaggccgagcagcaatccgcgaagcctaaggagactctcggcaccatcgccctggccgcatctgccgcgcgtgccggagctcttgcctcgcacgaggagcgtgaaatgacccgcctagtctctgctgcagtcaacgtcaccttgcagaagtttgagatcaagctgcagcaattcaatgagatggaagagattatcgaggctgagcgtcgtgagttggagcaggcgcgtcagcaactcttcttggaccggatgacattcaagaagcgtgttaaggaggcccaggatgcgctccagactgtcagcctgcagggccccaacgaacacacgcatcagatgctagccgatgctgctactacaggtattggacaccactacagcttccagcctgttggcggagatatgcgggctggaacccagcctctaagcgcccaaggtggtgctgactacaagacccttgacctgtaggcttcctcaatacatgtacgataatccctcatggatcttctgagagggaaacctaaagggacttttgtttcgtctcgctgagttatgaatattctgaactttctggcttggaaaaggcgcacttttgtgcccttttttttttttttttttttttttgttatctgctggagttcttttctgttgattctccctctctccagaaagtggattgttcttagggggttgaattaggggttggggatcttttttcatcaatgtgtttactctttaatcatacgtccttgatgggaagcttgtaatcttgctcaaagtagagtgtaatacctctcatcgcctattgagtggcctagttgaccgaactttgtcttctaatattgcaaccaggactctagcggttggccgggtcttctccttgctccgactcatcctcatcgtccccactctcaactactgcatcgtcgccagaaagaaccggagcggagatagcaactgccggttcgttgtatctgggccttttcagcggaggcatgtccatgtcttccttcagatcggcgaaatcgtacccgtactcctcccactcgctacggtagacggtccgatcccgccaattaaagacatcttctcggattctgcgttctggcagtagcttagtgtcttcctcgacttcttcttccttcataggttcgtcgaggttgaacggcacgggttgttccatcaacttcagaagattggcctcttcgcgatggctgatgttctggtctgtgagttctgcttgctcttcttctgggtctatttccagttcgtctggcaatacaaccggcgctggtgtttcggaggactcgtgcgtaggcaaagggtagttatcaaggtcgtctagctctgaatctagttccgaatctggttcgtattcaagttcagattctcctgtttctggttctggtgttgcctcaggttctgcttcttgcgggttgactgccatttcggtctcatcatccattccgacatcgtcgtccatttcaatgtcatcgtccatgatgccgtcgtcttcgctgtcctcttcgttgtcatcattatacatggttccatctttacggtaccgggtccactcgtgtgtttcgatgatctcctcggcttcttcgtaggtgaataccgtaggcacccagcctttccggttgttgatgtcttctaggacagtttcattgcgacgagcgatttccacgaatttaggcctgcattgcttcatatggagcacatcgatggcggcccggacatcttgcgttcgaacatacccctttctatcattcccactgcgacttgaactgcgcaatcttgacattgcaaagaagagtgatgattggaccaagcggcgcgtgacactgacagtgagggagtagaagtccacggcagtatctgcagtcatagaaggggtatgtccatacgatgtgattaggtcttttctgttggcaaggttccaccagttgttctcagcttgctttccaccaaagttcatgaacaaggcggaagaaaggcgaatccaatatggaaggttcagcaaatcagctgcgaggcggaggtcacctcgagcactgtcgtccttttcgtctgccagaccctctgcatgagctccagtgataatccagttatctccgtgttggtttgttcccgcttgagcttcaagaagggactctttcaatgatagaacatccgcatattcctctagtagttcgcagcattccgggctgacctctgtggccgctgggatatcgctcaagacaggcataacttccaggtgcacgtcggaactatactgggcctccaaggccttatgcaaaagtcggatgtattccataacctcgagttccgacttggtgccgattgcagtagcaatctctttgatgctgcctttgccctttcggtccaatgcattgaagaacacttccttctccgtgggcgtccagaccatcgagccatgttgactggcttggtatgtgctctcgagttccttcaacgaggcataatcaatgacctcatcgttttgcacgataaggtgggagtaggctcggagaaatgtgagaggtccacgcatctgcgggacgcgtgccataagcgcatcgccaatttgtcgtctgaccccatcgaatgacgggtcgcggttgtaatcatatccgttcggtatttgatttggagttgaagagcgttcattggacgagcagtgttgctcaaagtcggactgaggctctggttgttcgaagtcagactcaggctcgaagtcggactcggactcggcgtcgtcgtcgggctcataggcggaagcagagtcgctcatcgttcaggctcgcagatttgcagcgcatgcggaacgatcggtagcaaaacatcacagctacgcccttaacgaaatctgccacgtcaattcatcgaagagctatagaaacaactgaaaaaaaagttgagaattacaatgtatggtaactaacaaatttgaatggacatgatgacaaattgtaatatacagtgactgttcataagtttttaacacccccacccatataccgccttcctatacagtctacaccgcgtacaaaatacgcagcaagtatgggaaatgattgatctagagcacctaaagcatctctaagacaatgcctcgtgtacaggctatcattcatagtcaggggtggtatgcacacttttgtatggtatgccccgtaccgaccgtcacatgacattctgaatgtatttaaccgttgccaagattgttttatgcaacgttatcgataagattgtttgcactgtttgttcttgtgtttgagcttcgccggagaacaaaagggcatttgcaacatctgcatggagttcatacgctgtgtctcgcgattgagacatccaagaagatacttggtgaagagtcctctgttacaaaattatttgcgccatgtacgcttcaattcgaccgagtcttcagttcctccaagcattgtgctccgggactaccaagaggaaagcattcagtccgtcctgaaatatttgggtgaaggccatcgacgtctggggatttcgcttgccacaggagctggtaaaacagtaggttagactcgctctctatccaaaatggtactgatctttgcaggtcatattcacacagcttatcagccgaatccctcctcgcgatgcgaaagccaccaagaccatgatcatcgttcatcgccgcgaactcgtcgaacaagctgcgaaacactgcagagtcgcctatccagacaagaccgtcgaaatagaaatgggcaagaatgttgcgacgggagcaggagacatcatcatcgcgtcggttcaaacgctagcccggggacgcatgtacaagttcgacccgagtgcattcaaactcgtgttggtggatgaagctcatcatattgttgccaaaacataccgcgacgccctggggcattttgggttgaacgagccatctgccaatggaccggtcttggtgggtgtttccgccactttctcacggttcgatgggctcaaactgggtgctgccattgatcatattgtctatcacaaggactacattgacatgattggtgaaaattggctggccaatgcagtcttcacaactgtcaagtccggggccaatttgtccaaagtcaagaaagatagtttcggagactttgccctcggatcgctttcggaggcggttaacactacgtctacgaacaacatcacagttcgggcatggatggcgagtgctgagaatcggaagtccactcttgtattttgtgtcgatgtcgagcacgcgcggcagcttaccgccgcttttcgcgaccatggcgtcgatgctaggtatatcacagctagtacatctaaagtcgtccgtgcgaaacagctacaggcttttaaggaccaagagtttccagtgttgcttaactgtggtcttttcacagaaggcacggatatcccaaatatcgactgcgtgctcctagctcgacccaccaggtctcgaaacctgctcgtccaaatgatcggacgtggtcttcggctgtttcccggaaaaaaggactgccatgttatcgacatggtagcttcactagcaactggagtgctatcaacaccgacgttgttcggcttggacccagacgaagtcttggacaacgccagcatggaagacatgaagaagaatgatgataagggcactcaatcggaacccacccctgaggccgaggaaccatatgacggctcggacaatgacctaaaacttcagttcacgacttatgacagtatatacgatctcctaggagacatgcagtccgaacgacacatcaggtcgttcagcccgcacaactgggtccgggtcggcgatgaccgatatatgcttaccgatatatctggctgggtaacgattgagaaaggggacgacgatatgttcacggctcatcatgtcatgaaattcaaaaacccggcaacggacgcaccgcaattcacacgtcctcggaagatcgccactggctctgacttagaaagcattgtccgggcagcggatacctttgccagtaccaagtttgatgagcattacatcgcatcttggaaaccttggcgacgggcccaggcaacaccgggacaactaaagatgctgaacgcagctcgcattcgagatggcaatgtgaagcccgaggacttgactcgcggcccagccgcccagnnnnnnnnnnnnnnnnnnnnnnnnnnnnnnnnnnnnnnnnnnnnnnnnnnnnnnnnnnnnnnnnnnnnnnnnnnnnnnnnnnnnnnnnnnnnnnnncattcgagatggaaatgtgaagcccgaggacttgactcgcggccaagccgctgatatgattacaaagctgaagcatgggggcaagaaacgcttcaaggacttggaggttcagaagcggaaaaagctgcggcaagtagatgatatggctgagctgcaaagaagagttgatgtgaaggtcgggccagtcgatgcttgattggaataacatgtggtgccttgtaaaccattggatcaacgaacacgtttaacaagcgaaatttttctaaacagtcgcacaatgcccgagagttacgtgactatgtgccgaagagctccaactgtacaaagtcccagagcagcacccgtggcattattcgaagttgagattagtatatccgtgagctctatcacttatatattttacacttgtctcgggatatatttcggcccaagctgggcggtatgccgagacagaccgaggagccggtgcatactacataattgaaaatataaactttacgaagatgattccgattcagacggtctttcgggtatggctcttgatggagtcaggaacttgtagttacttggaccagcacatataggtttacaggtctacagcagtcttgagataataacgaatgtttgaacagagaattgaattgaattttgtcctagcaaagcatatgaaattcatcaaacgatcataatgtgcatcaataaacgccccaagtgggcgttcaaaggtcatcctcatcggagaacacctcctcaccacgcttgcggcgggcagcacgatccttcttcttcttgcgaagctcagagcctgtaagagaacaattagaatttgaacattgtgatgcataaggaagtaatgattggataacttaccagtaagcttgaccttctttgtaacaacgatcttgttgcccatggcatcgaacttgtcctcatcatcgtcacccttggcgtcgagacgggggccagagccctgaccctggacccaattgtgtccggagggggtcatgacaccgtcgttgacggcccagacttcctcagtcaggtgctcagtgaactcacgggagtgagtaatgataacaacaccaccctcgaaagacttgatagccttggagagggcaccgagggagtcacggtcgaggtagttagtgggctcgtcaaggacgataaggtgaggacgctgccacgagcaagcggcgagaacgaccttaacacgctggccaccggagagaccgcgcatgcgagagtgagaaacaagctcggcatcgagaccaaagttggcgcagtgctgctcgatctccttgcggacaaggggacggaactgaccggaggcgagggcctccttctgatcaacctcagcgacctgcttggggtgagagacaataatctcggagcgaggcaaccaggtgttgtcagcggacatgagaggagtccacttctcggacttcatgccgacgttgtcacccagagaccaagagatctcgtactcgtaggtgttcttgaacttgcgacgagagtggataccgatgacacggcggagggtgccttcaatcttgtagatcttgtccatggccttctcatcctcctcggtgacgatcttgttggcacggtccatggtctcgcggtcctcaccggtctggaaacgccactggatgtactcggaaggagtggagttgaggtggttatcgatgtgagcgaaagcgtgctgcttaatgtaggcaatacggatgttctcgtgctggtagacctcaccggaggtgggaatgagttcaccagtcaggacgttaacgagagtagacttgccagcaccgttggcaccgatgacggcaatacgggatccaagggagacctggaaggtaattccgtgaatctggggcttgggggtaccggggtactggaaggacatgttgctaacacggcaaatggccttggacttggtcttaacaccctcaaggaaaccgggctcggggaacttgaactccatctcggaggcaccgagctcgtagtaggaccgagcagcggggtgctgcttgacgaactcggagagggtaccacggtaacggcggagcttgaagcgctcgtagtgaacgacgtgctggatgacgttgtcgaggaacttggagtcgtgagaaaccatgatagaagtgcagggggagttcttcaggtactcctcgagccatgcgacgttcttgacgtccaagtggttggtaggctcgtcaagcaagagaatatcggggttctcgaagacagcacggcagagagcgagcttcatcttccaaccaccagagagggcagtaatgggaccctgaatctggaactcggagaaaccgaattcgttgagcagcttgccctcgagctcctcacggggagggttctgtccaacctcagcaagcttcttctgggtccaggcaatgacggtctgctcagtatcggcagagtcgagatcgtgctcgacgtagacggtcttgacctcatccttcttggggaaaccctcgagctgctcgttgttgatggcacgcatgagggtggtctttccggaaccgttggggccgaggagaccgtaacgctggccacgcttcaggcgcaggtgagtctggttaagcagaatcttggcaccgtaagccagggagaaagtgcagttgcaaagatcgacaccttcctcctcatcggaggcgatggcatcagcggcggcggcatcggggcaagccttcttgcggagctcctcagcgatggacttagcattctcctcaccgacgatggcagtgatgtaaggcatggtgttctgggtccagatgacgtggtcgttctccttctcgtcaacaagctgagcggcgatggcagcaacgtaggtgatggcctcctcggaatgggcaatgacgtccttgtgcttagcctcgaggatctccttgaggatggcaacgatggtggaaatgtcaccagcgcgggaaacctcgggaatcttgccgtccacaacgttaccaacacgggaaagggtgtcaagagcctggcgagtcttctcacgggcctcggggtcggcaagagtctcgaagttcttgttcaaaccgggcaacatcttaggcaagaagggagcgacaagctgggggtcctccacgagcttacacatgttgtcgacaatgacagcggtcttacgcttgatggcggtctcacgctcgacgagaccacggtcaagcagggggaccatgatagcgagggtagggccagtgacatcagtgacgaaagtagtggcaccgagcaagtgaacggtctcggcgacgttctcgggcttggcgatacacttgatcagctcgggaatgaaacgctcaatatccttgttgacgatcagaccgcaaaccttctccatggtggagtaggcagccttcttgatctcggccttggtgtcccacatagcctcggagatgacggggatcagagtgggaacctggtagccaagctgcatctgggcagactcaacgaggatgttgatgcagtcgagagcagccatcttttcgggccacttctgggcgttggcgagggagtagaggataggggtgataacggccttgacggcgttaccgctgacagcctggacaatggcgatagcggtggactgggcggcctgcttgacggcgacaaccttgtcaccaacagcggcgaggacagggccgaggagagccacgaggtgaggctcaacaccgggagcgattgtggggtgggcggcaatagcacggataccctcgcaggcacgctcacgggcagtagcatccttcttgttggcgagctgcttcttgaagatctcggtggccttcagaggaagagtctgctcggcgataggaccgctgaagagagtggcaaggttggtagcagcggcgttggtttcgtcggcgctggtggagatgttgaggttcttgatgaggtcctcgaggacagcgaccgactgggcggacgccttgccagtggcggcaggagtagcgtcggaggcggcgggcattttggaagaaattttggcggttggagaagagaaaagggtattagagtaaagaaagaaaaatcctttcttttttttctatgaggggtatcgtagaatttttttttttgagcaaaagactcaaatgcgtcaacttttcagacgcgggcgctcaaagattggagcgagacttttttctattctgtctatgcagagtagaaaaacaaaaaaaagaaagaggccgaccctcgaaaaaaagatgcaggagtggaggagaggagggggagaagggaaggggggtgaggatatttatcgtgtggcataacctgggcggcaaaaccctatgaaaatggaattcagattttttctgaattttcaggctcatgttccgcgctaaggtcgaattaggcttagctgattcgttgctgcactatcattggttgaagccctgctttggtccgaatcgcctgtccatgattggttgagcccgttgcctggctggatttggtttagttggtggcttttcttttattttttattcgtttcaatattatattgatgtctatgttgcatgttgtatagagcctatacggagaagttacgggcatctggatatgatgtgaagaaacactatctgtctgctctggctctcacctcgagtcccgcatatctcatgtgcatatccagaaatagtctagtccctatggtaccaacacttctatcctcgttgtacaatatacaaagtacatcgtaaccagcaaggcgcgcgagtcgtcgttcgccacgcacgacaagtggcgcagtgccatataaacgccaaatgaagacccccgagttttcccccaggcactacatattttcggagttgctagggtgttgaacgttattctacttcatgggtttattgttcctgtattcgcccagattcgggcttggtacctccgtgtcaactgtggatgcttaccactgaattacacatgtacctatcctatccgagactatatccgagactagatatccgtactccgtatgtagttgacatgtaggtcagagctgagtatgtttcagcaaaaataataatcatcggataagcccgtacaaataatatccaacagccttcataaccacctgaaagtgacaattcgtacaatatatatgaacgtccaattaaacgcgaatatcaaccacgggatgtctgagatttctttcaccgcttgatttctcttatcgcttatcgcgtgttttatacaaaaagccctccaagccctcgtacgttgtacattgcgctactccgtactaataataacatcagacgtaagcaactagaacaacaaaccgtcgagatcctatcccccgcgaaaaagaattatggtggcaaaacaaagaaacccaaacccaaacccaagccaaaagccaaaaaaaggaaatcggctcagtcggacccagtggacctgaaaacctaacaggttccttactttcaacaatgcctattgaaaaaaaaattcagtcgctacttcgtatagcatggtcactccgtaggaatccgagatttccgcgcgagcgaatcacaagggaggaattcttttttttttctgaaccaaaacaaaggttgcatctgacagtgacccaagttcgcaggttcgcactcgtttcttttccgtttcatttttgtctgaacgtggcgttccctcgccacttggcacttcgcctacgtcgaggcgaggtcatcacattctacaccgtatgcctcgacatacggctgttctatgttgtacaatatcatagaaatagagtaactagtggcaggtgtcatctgctgatctagacatgtcgttttgatctttagagagtggatccatcatggcatctgtacccggtgccccagatgtttatttgatggggaacggaggcgaatcttcaatcttacttagtctaacccctttataacgagttagctcagttatgctagacatgcatttagtcctgatccaccattgaatccggggtagatgccgtgtaaggaggttgtactccgtagtgcaattgtgatcttgttgcattcgaagctctgatcctttcatttctgatctatttacttctgtttcttgtacgttttattctttcctctttctctcacggcccctttttacccatgcttggtgatgtatccaagcccctttttgtggcgtagcgcttagacccttccctttctctctgatatatagtcctaggggctgggctgagatgacgggcctatcactttgatgaagcagaaataaaggggtaacctatcggaggtcggtcatctccacgctgggaaataccttcatcgactccacatttatcgcaccgtcttcgctccgtccaactagtctcgctctcgatactttcagccaagagaacgtctacggacacactcttttacttgcgatacactccccgctaaactacttcgagtacgtctcccgctggccgcaaattttaatcagcttgtgtaagccttcatcctcaccttcatcaccaattcttcatcgaccttgaccagacttgccatccttttgctagatagctaggtatctatgtctcatcgtggtaaaggttacagacgggcacgcccgccacctcgttttaaagagtataaggcccaattaaatgctacccagggtatcctttgcccagattgtcgtcaattcaagcttcgatcacatggctgtgacccagtttgctaaacctgcggcaatcattttaccccacagactggctgtccagatttatgtgatactgctccctgttgtggctgttgcgataagaaacttattgataaatcgtctgaatcttttatgattagcactaatgggttaccagtccagaaggtatagttgtcttactacttagttataagaagtttatacttactaataggatttttctccttttaggttattttccattatttatgacccgttattaaagtacttctcgacttcgtccttttagattagaccttagaggctgattttacccataccccctactatactatagtattagttgacacggtgagcggagagccagaaacggctgccattgcaccgcccctctgccgtctccgaccgcctgcccttctccgctaccacatccgacaatggacccacatctatagactgagagcccgccgtgacttgttgcttcggatttatgttgcaacgagcttcgcggcatttaacgcccgtctggcatggtcagccggacatccaagtcgcaaaacaactcctccaaatcaactaaagccctaagacaccctgtcataattgtagaggcaccaatacgttgaacaacggagtgtatttcgagataatcaaggagcccgttagacaatacgttgaacaacggagtgtatttcgagataatcaaggagcccgttagacttgatattcctggacatagcaaatgcaatgatgttgtaaagtaacgatatccgtagaatccgtggatcagtggctcgtcctcataagtccactggtaggtaactctttaggtcgtttgccccgtttttcattgctgtatgtttcccactgaggaccccaaaatagacgtgcgcttttcgcaccaccgccattttgggccagccttaattccttttcgcgcgctcgtactcgttgactgtgggttttgctttgacgtttcctcctatttcttgcggcgatctcgtctgcactcttgcccgtaaatattcttcgtagccagtccatgaatactagcagttgatcgggttatcagatgcggtatctgcagccccacaacttttgaatggtgccagtgagaccaatggactggagtgtgttctgtagaacagagatctttgtctgattttacggatcaccattagtatcatatgcggccacatttaattgatcatacatacgctgggtgcagaagtcaggtaggctcaggggttaaaatcaggtatagacccatcctattaattggatttcaaataaaccataaagccacgtgactatctttgcttatttactgtatcgtacgctggcatcccccaccactaacgctcttggacattttgattcttttgtccctcggcctagttagtgccctggcaacaaaatatccagccactcggcagagaacggaccagccagggtgcatggatctacaatctcgcagactcgagaggccggttctgttacgagccaattcgattcagaagaaaggagtgcaattcaaaccaaattctaagtacgaagaagaaaggaaaaaagagaaactatctgagtgcgcgttcttcccttcttatacccttgcgtttgtcttcgcttaattctcgttcgtccacttggaaaggtacaagggcatagtcgttcctgcctcgtttggcaagtacgatccttagatcgtcacaggttctatagttgctcggcgttttctttgtgcgcgccatgtcctgctgctatttgttattctttccatgcattaccagtttgcagttttggactagcgtcactctgaagctaactaaccgaattgagaatacatacaaaatgcatgtcttaatggttgagatatatatttccagctgagcatcgtatcatcacaactatgtagcctttcaattttcttgggatcaatacctaggaaaagcgttgagaagctttattgatacctattaaatgaccatggaagtaaacaagaacacggctgctataatttgaagttataaaatatcgcatttactatgtgttttgggtgggcggctagcttagaaattacgttatccaaggacaaaaaaaagatgtataacgacagctgtgtgattcgaacacacgcctccgaagagaattgatttctaaattgggggttagtaagagaccttgcttggtcagaggtattaggtggaactcaccgagctgtgtaaggttagcaactgctgcttaatttggcggtgggatttaacatactcaatcgccttagaccactcggccaaactgcccttagatgctgaatttctccactattgaatcctagtggttactattcttaacctcagaaagcgaccgtccgtagcacatcagtatcctgagaccatccatgtgacaaaggacgctatttctggccccaaaagcggcaattttcggcgtcaatcccacatgtcctcatattctagatgtaaaccagaagtgggcaggatacatggcagaaatatggtcgaattctaagtagtacccaatctggaaggcggtactgaactaggtgggagataatgtctgcaatgcctccgccctcttgtacctctgggtataaccctcctgatctatagaatacttatcacgagcaccgtgcgccagctcaactagcgagctgaccgtattgcaaatgccgcgcccagttgcgggtgagaacttgacaaagcgatagtcccgctgggttgcaaacgcttcagcttccgcgtgcaacactggggcttcaccttcacccatggcggcgatcattatcgcaagaaagggggggaccccgtcttcgcagcggctgcgcatcctcccgcaggcggcgaccatttcgtcctacgatgtcctcgacgaagcgtcgtacgtgaagacgagacagacatgctgcatgaggcagaggtaagctaggccaacgtgtatcagagaggctagccgggcttgtacgacgtgcataggtactccaagagcccccttcgctgcgtacatgttgtacatattcttcaatattattgagtgttggcatgcatagacacttgaatatatggcctgtctatggcagtaagtctacggagaaaaatgtgaagtggtacagattagtatgtgggaatgcacaattctataaaagaacaaaaacacacagaaccgccaacacgcccagaaccgtcaaacagaatcagtccatcctcgaacccgcaaatctatgtccagtgatcgaacaataaaacgaagcagaaagaaaagaaaagcacaccaggatatatacaagacgtcgtcatagcagccgccagaccagagaacggaatctgaagtccggggttgcgggggtcgagtagtatcacaaggtcctggtgattctcactaggagaaacatggcctcgtggattaggtgtcgtgggaagaggtggagaggttgaaggagtggggtaaaaggcaggaaaagatggggacatcgatacgtaaaatcgctgggaaagacaaccccgatgtctgtacaaaaggtgaaaacgctcgtaactccagacccatatgcgcggcgcaactccgtgccaaaaggcaaataaaacaagcggaacaagaacaacagacgtgattagctttcatggcttcttcttaacgtggctgctccccgtttcaggtgggagctcgtcaccatcgatgatacgccacagacggcgcggtgagaagttgttgccaaacaggtaaattccgacgagccaggctgcgaggagattggcgaggtggtggagaagatacgcatatgagacgccatagattgctgagtagatagcgatggcgaagaagatcattgaggtgacgtgtctgaacctatagcggagatggatatgttagttggaacttgtgagatgtaacactctagagtctacatacctggtcgtgatgcgcggtatcatagcgccgctggtcatggtctcgacgagaaggaggaagggcataatagataaaacgttgtggtgggatgagaacggcataaaccagtgcacgacaagattgtgggcccagaccaggaggaccagcacgttaattggcagaatccacaacatcaagattaagatggagtgtgcatagttgtcgaagttcaggtgcgaggtggatctggtttctttggcgtgccattgtgcccgcacacatgtggctagctgcacaatgcaggcgaccatataggcaaactggtaggggatgacggtcgagacaaggatcaaaaggatgacggtgtggatgatgcgtcgtcgaggagtgggagtgtggaagataggcaggtttccccggtcctctcgccggatgtagcctgacttgctgtgtacgaccccataaccccaggagaagatgttcacgagggcaagggcgagatagttaacaaggacacatacaccaacgctaatgaggccgaataccgggactaagaaccagaagaaagcgtcttgtgagccaagcaataggtcattcttggtgaagtcgatgggagtctcggtcgagttggaccgccaatggagggtttcgtcggtctggggcagggctttggacgtagccagagaggtggccagtagagacatagctaccagcaggagcgggaaggaagaccgcaacgcacgatcaaggccctcggtgaagggaataaagtaaccagactcatcgtagacctggaactgcttccggagaacgagggcaacgacgagcagtgggaaagccgcgaatatggtccgataccgcatcactagctcaccaagactgctggtgagatcaacttggagggagatgtcgaccgtcgagtcagaggttggatccgtccacaggtgaaatgatacgcccccgagagcggcctgctcactaattgcaggcggcatgtacggcgccacaccgtgcaggttcacattgacctcattgacgttgacgaaaaacttcgactcatgagggtcagagacggattgacggagcaagggagcgaacagttcctccttttgaggatggcgagtgatcttcaaccggtagtcgagcagactcgaatacaatgccgggatcttaacctccatgagcattggtcggttggcgggtagccgcatctttaggccagcactgagcagccctcctaacccaaccttagcccgaatcattgcatccgagctgtccgaaaactcggcgacaaggaagcctggagttggtacattggctttgtctacgacagccacaaactgatgttctgcgagcgcctccaagtcgtattggagatacgaaaacggtggggtacgatcgtaagcatgtttagatgagcgggtcgaggcaggcaaatgaatactgtcctcagccgcgctcttgcaggccaaacgggttgatcccacagtgccaccagagaaatctaaattcaaggggaagttggttgaacggccattggatagcgggaacacgctgcagaataggacctcaatattgccattcttatcaagcgattggtccgtgagcagggtgaactttttaccagagacgccctgcggaggaatcggtaaaagacgaacatcggggccatgctgtaggcccagttcacgcaggatcagccgctggccctgcgcaagaatcgtgtttgcgttatcctcaagtgtcagaagtgtatttgcctccttctggggcagtgtacgctcggccactggctccagacccgtcaagtaccaccgcttgagcacacgcatccgttctgcccgtggtttcgtttgagtagggcgtcgggcatcgacgatctcgaacaaggatttaatgatggtcttgcggaactggtcgcaccaagtaatcgacagatgatccatgccaatccagacatccggaatagaagaggtgaatacggtaaatccgtgggtctcaggaacgagagaggagatactggcgtagtcggagggcaccacggtgtcacgcgcaccacccgcgatggagatgagagtgacatgccagagtgggttattgttcgcccaagtctgcgcataggcgtcgcgccaatagtcgttgatttgtttataggtgtggacgatatcggaatcgaaggaaacaggcggtttcgcatgaggtgcagacatggtgatgatcgtattgaccgaattggcttgatagttcgccatggtcaaagcagttcgagccactattccccccatagagtgtccaacaaggattactgcgctgggatccggtaacccggggtctcggcgggtgcgtcgcggatcatggtaaagtgacaggatgtatgagatcgcctcgttcacgtattccgcttgatccaacagtgtttgtccatggaacgccgccatatcttcgttgaagtccaccatgaaaaagtccaagctccgcgttccggccgcatggcggctctcgtcgtgtcggaccacatcgtagtaatgtcgcgaggcctcggcggccagagatcggacttggcggtagcttccagcgttcccgggcagaaacagaactgggacaccgttcaactaaacacagagtcagtaagaatccaagcgcatgcaccgagtccgggtcgccgtaccccgatgttatcctgggtgtaaggatccacgccttcttcccgatagacgaagagattgtatttgcttgcaaagcgggtatgttccgtgtcaaactccaacatacgaatgaacgtcgggctcatcatcggaacaccgcaaccgtctccgccatgttgccgaccggtgaacgagccgacgatgcagactaagatcgcgacagcagcgcaagtggtgaaggccgtcaggatggagcaagaccatggactgcgttggcgagattgtcgcgcacggcggccgccggaaggggggacttccatcggaagtcgcggggagcccaatggcatcgatttggtatcgttggagggttggaaggacggggtgcgccacatactcgagttccgggagcgcggtgtcgcgctgccctcgcggcgaaggtcaaagctggtgccgcgctgagctatctgagatcgggttttctcgtcgatggcgtttccatcgtctgttcgggagaccgaggaatcttcgtcctcgacaggggagcccgacgagcgtctgtgcattggagaaggtggagccgggacttcatccagcacacacagacaggttcttggcgcagggggttaaacctcgcaagagaacccttaacgagtaaggaacgaggggaggggaaggggtgggaatggggaaagacaagaatggaagccggggcggttggaggtttgtctggggtcttggcggagaaaaggtgtctgtccctgacagtccgtgtcaagtccctgaaagtggtcttttttgtgggtacacgtgtaaagtgtttatggactttagcagaggttcttctaatctttgatctcttacgatcttgacttaagatattcaccgatgctcgtttctttttttttccgacgcaattggcaatgtaggcttggcactacatagccctagtttgttaatatgaagcaagcctatgttgaggatggcctacaaataatatactattttatagctaatataaacagaatcggatcaagacataaggaaagctcaaggtcatatgtatagatgcgctgagccaccacggcaggcaatcgtgtatcccctcataatgttcctgcaggacgcgtatgccacaatagtaagactggccaagtgcttattaccatcacaaatagtatctccgttagatattagggatcgcatactatccttgtacaaccttgaaacatttgaaaccagctggatgttccggtctacccgtggacccctagatatgtagacgactctagttatgttgtattaactattaggagcaatgacgtgacagactctggcaaggctattaccacggagtagtatagcatcacagcgctatagaacaactagcatccaattgatttataattagctctctttttatctcagttgattttgtttgtattctcatttaaaacaattccaatctcagctggatatagtgtacaagtgcggggtgtagaattcctgtactataaagagcctctcctaagtctcacgctcactgtgtatttgctctttgtaggatcatcactattatctagtataggctggtactacgtgatttctttgtgctccactgttacacttaaggaaattaagataccccttaaccctaagactggcctgtgcaccagaatgagcattgtacattaagcagattcagatctttgacacgacggaacatctactagtacttaccaaggccattgggtgacacccgctaaccttctactcatagagcaacgaggatacacgagagcgaagggtactaccgaggttaatacacaacacaaagcgaatccgtgaaagccaattcattgtcctatccgattatcccattttaatgtcccttccacattctcccaaacaaaaatcccaggtcattgaaaggtccagaaatacaaagcaatcatcagtcattgcgcgagcgtcaggtatcacagtagcctggtagtctacggcacaatagtagtcgtagccttctcaggatcttccccgaagtcctccttgggattgagaccacggtgagcagcaacctcctggaggtccgcatcatgctcagcatcgaagttacgacccaaacgctctggtccagcaattgtaatcagaataacataggcaaagacgcagcccatgaagatgcaaatgaccttgccgtactcgtagcgatgggcggcttcttcagtagggggcaacgggaagcgttcaccgatggttgattcaatagtcgagctagcggaggagaccaagttgccgagctggtaggcggtgccgacagcgaaggtgcggatagatcctggtgatagctccataagatggatagggatcacaccccatgcaccctggaccatgaactgctcgaagtaggccgcagcaatgacattcttgttctggacaaatgtgtaggggtagagaagggcaccgccgatgatggagatggcgatgatagagaaccggcggccgaagatctgactggcccagccgcataatacaccacctgacaaggcgcctaggttggcgacaacttgtgtcacggtgactgcgttctttgagaatttgaactggttctccagcattgtcgggtaaagatcctgagatccgtgcgactaatttccatgttagcttcttctgttactcgaatagcaagtaatacataccatgaaattaaacccagacataagcagaaccaggtatatgagtatcaaccagtgtcgctgtagtgcgaccttcccttctgagatgaacgatgccgcaacacctccacgcaattcctgtcgcgcttcctggcgccgacggaaagtctcagtttcaccaaggaataaccggaagatgatgatcaagactggtggaccagcggcaaaccagaacagcggccgccagccttcaggggtagtatcgactagacctcgagcgaaagccgtggctagcagatatccaaaggcgtaaccttgctgcaagagtcccgagataataccgcgggcttcaggcgggcaatcctccagcgcggtggcagccgcattaccgtacaagccacccatggcaattccaaacaaggcgcgacaagccaggaactgtttataagtctgacagaaaccagcaccaagctcgaggacgacgaagagcaactggttgacgatgaacggccatttgcggccccatcgatcggaggcgattccgaaggtgatggcgccgacagatcgcagcatcagaaccagggtgattccccatgtgatatcggtgacggatttatcgaatgatttcgccagtgcagaggcagtaagcgagacggtgaagaagtcaaacgaatcccaggaccagccaagaaacgcgacctatagggttaggctagttagtcaaggacgtttcctacctgttagccttatggggaggaggacataccgagaaattcagccactgagaccggttgagcagtgtaagagccttgaacgggttcggcgccgggttcatgggaggcactagagaggagatacgagtggcgatgtagcggccaacactcatatcctcctcgaaatctggcgaggatgtcgccgcatactgagtctttccctcatccatgactgctaaggatcttggagcaccgatgaatcggagagtaaaagccggatcctggcacaaagtccgaatgaagagggataagagaggtcacaagtcagccaggggggtcctgggccgctctaaatacggcggggaaccctcctctcctctctgctcaccgaatttagcgggcatcccgaggaccgaaaggaatcaaacaaatgaccaccgacgtctgcgggcccgctgtatacagggatgatacgttatcttattcgcttgccacgcgggtcagcaacctggaattcggagacgcgcacgaatgagggcaatctaagccgatcatagtacaattacggggtatgacccagacaacgagagtccccatggggagaagctagaaaagtctgcgatgcaaaatgacttaatggcatgatttttctatattgtccagtggatacagcttgatgccaggcactaagcccacagtctttttccgtgaattctttagtggcattctttgtcttttttatctagacctttctataattgtttcgtaaacttttctgagaactttgcaatctcttccggtatgtgctttgattcggatgactacatctaccagtcacataggtacgaaagtacgcttactttgatgttagtgtcttacccaagaacatatcccggattatccacgcggggtgtggagttgaaaaatggaggggaaaaatggggaaatccccccacaaaaatagcttttctccttgaacttccttgcaagccactgaagccaggccggccgtaggtcggtctcggggtttaatcggctgttataagtattgtcaccggtcttgtgtgctaaactaaggtagaacattctggactttgttctttttttggggaagagacacttactacatagctgctcacgatatagtgcagtaatccatcctcccacactctcagattgtcctttcaatgattcagcccaaggttacttggcagggcttctctgaagtaagactttgcccaggtccatgggtggatagtagactgccaagaattacaggggacaatgcgttggccacatggtcggcttctccccgaacatcccaagtacggggtacggggtactcgatacggaggatacagaagagtgccttctaggcgtactttgggcatggcagtatcacactcggcatcgcgaactgtctagacttactacaagatccgagatctcagccggttcttgcctatagtgccgataaatgccatgctattggcgagaaagctttttatcaccgcgctcggactcggacgcttggattaccctgcatgtgaataaattgggctgaatccttcgcctttacttggccaaggtccccagttttttttctttcggaaattatactccgtatacccatattccgtaggaatttccacttctcggaaatacaagcctgaatgggcaagccgttgatagatacgccgcgtcgcggcggttgtcgatctttaatttattataaaccgaggctggggaagtttcgccgcagataacgttgtgcggtttcctcttgtcttagactggggaggctctttgtgcgagtaaggaaccttggaaggttccaaggttcaatgtttcaacgttagcctagtaatttagtcctgacttggttccatggtagcatatttgctgtcttacagtatacgatatgaaagaagttctcaaacgagcaagtagggagacgcatctagattcgttaaatgctctcgcctccatcttaataggcattctcattgtcatcatcttttgggaaacaggaaacaccgactatatgataatgctggattggattgtaacagctgctccgaagaatttggatagcttgcacggaaagtaagttcttagggctaaaaatcaccgccttggctgtcaattgtgttttctcttcactcgtacgcaggttgttctacggagagatactaggtagagaacgcgtgtaatagttattgaggattatatttacaaaaatagtcggccgggtttgcggcctctttccttagttggctcgatggctgtccttttttcctacttatattctcccccttcgtgggtttttttttagctgaacggcagaaaaagattgatttgtgagctcgatctttctatatctaactagccctggattatggaaaaaatattgagcttagtctcaaacttttaatgcgaaatcagctagccacttgggttggaatcattcataggaaataatacagctcattaccaggaggccataacaaaaacatccgttcttgttaaggcccagagggaccatatcatagactgacactatgctttcgagcctaccttttttactaaaacaccataagcatagttgggcttacaagctcatgaatgacccagaaagctagttcacattcaggagctcaatacgcattttggattgggatagcatcagtggaaggactcatgtccctgtaatggatgctgaagttatagtgctgcagcctgctctattagaagacctgaccgaaatcttcggactcaccaagtaccatcggcttgactgtactcggcaggtctaagtacctagctcctccctatgctgtttgaagaccaagttgtttgattattgttccaatattgagccgataatatcgccgaacactacgcagttaacacatcaagacagtgcacttttggatcagcatggatgtcgtcgagtttggaggacatgatgaaagtatagtgaacttgatatactactaccggatcattgccactcaagtctctctgatttataaataggtatctaccaaatcagggatgctccttggttccctgtcaactgcggcccgacagtcttggcattgactggcttccagtggcttggacatgtcaaatgccaaatattgtgtaggcccacaatgaaatactagatcaagacatactcattggctatccaattcagctgaagaaaggctaagccacattctaagatgacaaggaagctgcgtcgatctgaaaccctcctgaggcggtgctcaacgctcagccccgcgagccccgccaatgccgtgtatttattgtcaggtcattcccagatctcaccttcctatccagttctcccaagtataactatacctatatatcatccgaccaaacatctacctaagaaccaattcttatttcctcgatatcaacatgtcgtacggtggaccctcgcagaatcaatacggtggtggtgccggttactatgaccagcaaggccaaggataccctcctcagcagggctattcccatcaaccacagcaaggatattacccaccagaggtgagtctacacacacgatataccgttgcacagaaccgtgtcacacagcgctcaaaccctcactctccactcgtactcgtaccgcgagcatacataactaactttccgcgctacagggtcagcaggcttatggtcagccccagtacggccaacattcaggtccttatgaccaacaaggcgggcagggctaccctccacagcaccagcaaggccagtatcctgcccaaggcagtcctggatacggtcagcctccccagcaacagcactacccgcaaagtggtggcggtgagagctcctcatactacggtggcgcacccccgcaccaggaaggacagcccggtgctgtaggaccggagggagaaaggggcctcgggtcgacactgcttggcggcgcggctggcgggttcgtgggcaataagcttggccacggcctacttggtactgcgggcggtgctgttttgggtgctgttggtatgaatatggcgactaataagctgtgagtgtccttcttatcattatatcttgtttgttgtcttttggatcgagactgactgttgatactctggtatagtgagaagaagcacaagaaggagaagaaagacaagaagcataagaaggataagaagcacaagcggaagagctcatcgagcagctctagctccagctcgtcctctgacagcgactaattggtctcttttttttgggtctgattggtcaccatgacttgttttatcctttacattttgtataccctgtcttgttctctgctgctttttccgttccggtaggttcgttttggcttctcgtcttggggactggagaacctgtatgcgttacgtttatcatatgcatttgtattctcaatgacatgacagctcatcaacaaagttgaattattaaatcaagcgattatgcctttattgctgacatatatgggaatgcttgttagctgcatttctgcccgacagatagccctttgtttcagttcgcagagcagttgaacattgtaatgactatggccatgagtggcatccagatcgtatgttattaaattggttaatattttgttattgaaagtcgccgcgcttcagcttcgccctagccggaaaactctttgaaaaaagcctctgggtcgatgctactgtccagatcgaacgacagccgggggacttcctttggtgaatcccacaaaaagcgccacttctgtgatatcggattccagtactgtcggggtacaagagcagacagacgtctccattgacgacgcataagcctgattgtaattgtatgtggtcgaccattggcatattcggcaaaagtggtacctttctcaggtcccctggccagcaacctgaagagctcgccaccagactcggtctggaaaacctggggctttgaatttctccttttgacaggctcccatggcacagttcccgatatgagtccctcgagcgtctggagatccttctctggcaatggcggaaggagactgttcaatgtgttgttgtaccattttttccgaatatttttcttccgacactgggccaattctctgccccagctgtcctccttaggaattggaggttgaaattgtttgattaacggcctgatacggactgctgtaaccactgggttctgcatttgagagattgcgaggttcttcacgatagccgggggttcccagccatcactgaaatcaacaggctgggagattagctctttaagagccatggagtcattggggatttgcggcgttagaatttttgccagcagctcatgtcgccgtctcccagtgcgaccgtatgacagtaacagcaccttctcgagaggacgtgcatagccctcatttgctcgccgcagaaccgacaacgcatttcttgccgcatgaaccgcctgaggaccagccttcggggaacgagaggagacagcacgatatcgggagatgatatggtctttcatgtagttgcgagcgatggggtcaggtaggtaggtacattcgcgcagcgtggcgcgaaacaaatggcgccattggtgtggttttgagagattctgtacccaatgctgagattgtggtccggccattaggaatagcttatctgattgcaagaagtgcaaagaaaaagaaccccaaaacggaggaacgcgaaatccttggcgaaatgcgtgtcacgggaactccgacgcgccattttcgccgtctctcccccaaaccccgcgaacattgccttgccttgcattgagcctcatatcttaatactagttcaatttttactttgacacttcgcttcgttcggtcgctttctggctttgaatgttatttggtctggcctacggtttcccttcagagggttagccacgcgcctccttgagctcgcgtcattccaatcggcatccggtatctctccccttgctatgtactttaccccatcattacccgatttgtaggctgatattccctaaaaagcccagcatgtcgtactcacagggcagtacagggtcgaatggaatggcctacaacatgttgaatggttcccaatccctctcctccacccctcgcgcaactcctccgcccccgaaaggatctcagatgtcctctttcggttactccaacggaatctcacgaagctttggtggatatgatggaaccaatgagtatggttcggtaatgtcataccaggaggagtataaaccacagatttaccgagttcgtggtctatatccacacccacagagcatgccactgacgaggctcaaaaataggctgtctattctaatgttgctgtctatgaaatggaagtgaatggagttgctgtgatgaaacgtcggtccgattcttggttgaacgctacgcaaattttaaaagtcgctggtgttgtgaaagcgagacgaacgaaaaccctcgagaaagaaattgcggctggtgaacacgagaaagtacaaggcggttacggaaaataccaggggacgtgggtcaactaccaacgaggcgtcgacctctgcaaagagtaccacgttgaagaagcactccggccactgctcgagtacgatatgagccccgacggctccggagctcctgcgcacggatcaacgatagatacacccacaaaagagcaagcaatggccgcgcagcgcaagcgcttgtacaacggcggggataatcgcagcgcgtcgcagccgcagcagggaaccttcttccaaaacatctcgcgaaccgccgccaccgctgtcaatgccctcagcaaagcgcgcttcgactcgcccagctctaatagtcgtcggcccagcatggcgcgcaagccctcacagcagatgagcagccaggaatccgggcttgcattcagcagccagcaaaccatgtacatgtccgacagcgggtttggcagcttgcaaaatcggtaccaggtgcaagatgacaacgaggatcttgcggaacctcctcgaaaacgcatgcgctctacttcacaccaaggcccccctattggtctcacccgagaaccatctaatctatctatgctcgaacctacaccaacagaacctaacgactcattctatcaacaagtggatcttcctccccctcctattgatgatggctcgaaacgcggcattgagtccttggcgcctgcttctactcccgagagattccagaagatgaagctcattatgacattgttccttgataaacgaacaaaagactttacgaatcacccggctttgttggagttgaccggggatgatcttgagattccccttgatgagtaccgaaacaatgccctacactgggctgcgatgcttgcccgcatgccactgcttaatgctttagtagccaagggtgtcagtatagcgcgagtcaatggtgccggagaaaccgccctacaaaaggccgtgggcaccaggaacaacctcgattatcgaagcttcccacgtttgctccaggtattagcccctaccattgacatggtcgattacagcggacgtaccgtcctgcaccatatcgccatgatggctgcgactggtggcggcggacatgtctccgcaaagcattacctggaagctcttcttgagttcactgtacgacatggcggtatcgccccaagtgcgaatggagatcatgccacaaacgggatccccggcggtgaagtcatgtctctaggacgattcatctctgaaattgttaacctccgcgatgatcagggcgatacggccctcaatctggcagggcgtgcgcgctcagtccttgtcccgcaactcctagaagtgggcgccgatcctcatattccaaaccatactggcctccgccctgcagattacggtgttggtgttgacatggtcgacggaaactctcaatctcaacaaccggctaatcggaatgacacatttattgatcaattggcgaaatcgaagaaagagatacttgatggtaaatatcttctcgcattaatcttcatccttactaacctgaaatacagcggcaatgtcccaaattagcgcactggtcgaagaaacacttgggggaattgaccgcgaattggcttcgagcttgacacaaaaacaagaaactttcgatcactggcatacgaagatccgcgagtctgcgaaggctcggcagatcgaacagaaacaatacgatgagctcaaacgcaggagttctgagcgcgtagagctagaccgacgtatcaagaatctggagcggtcatctgaggggctgttggtcacagtgaacaatacaccaggattggacgcgaccaagacggctgttatcggtgatgcagaccgagattccggtgttgatgtcgcgacatttgatgtcctattccctgagggtttcgacccagcttccggcttctcggaacagcaactctccttcctggctacactgccagcaacagatctgcttaggcgccagacacaatgctacaaagaattcaacggagagattctagctgaagtcgattgtctgaaagcaaagaacgcagttcttggccagaactaccgtcgcatggtgatggcatgcacgggctggacggcgaaacaagtagatgacgccgcagagggcctcacgcaatgcgtcaaggaactgaatgacaatcccgtccccgaggacgaagctattgagattctgatgcgggatcgcgggcaggactggtagtttaaactgatgtgttgcattattctctgagcgtttaggcggcgttgcttcacttgtctacaaataccctgttggaatacatccatgcccgttggcacatgtcttgttatttacgagaaatgcaattcttgcacatttattcgtcttggctgtgtgtacgtgtaggctaaatgttgcaatattagccggtcgagttggctgctaggctaggtggcttgagaagcccatgttggttgccgagacatttagcccatccccgcgtttcacttgcttgcactttcggataaatagcctgctgcggataagtacttatagtcatgtgtagcacttccctattcatcattacaggcatcgttgtgcttttgacaattgccattacactattgagtacggagtactgaatcaagaatatggctaccagcttccttcacgtgaagagtgatattattgttggcggaaatggaaaggcagttgtgatgcgaggagctgctcttggagggtggatgaagtatgcaaatgatcggattgccgtatcattcccctgtcctcaaactgacatcccatcttagtatggagaatttcatcacaggcttcgcaggccacgaagcccagcaccgcgccgccatgcgccgagtcctaggaaaacagagatatgaattcttcttcgacaaatggctggagtacttcttcaccgaagcggatgccaaattcttcgccgagttagggttgaactgtctgcgtctgcctttcaactaccgccactttgaagacgatatgaatccccgggtgttaaaggaatcagggttcaaacatttggaccgagtcgtcgatctggtcggtgtttcacatattcatctgcatgggggtagcgactaatctcgatagccttatagtgcgcagcccacgggatctataccatcctggatatgcacgctgtccccggtggtcagaacccagactggcattctgacaatcctaccggctatgctgctttctgggattacaaagaccaccaagaccggactgtttggctctgggagcagattgccgccaggtacagagataatccttgggttgctgggtacaacccgctcaatgaaccttgcgatcctgagcatgtacgactacccgcattctatgctcgtgttgaaaaggcaattcgcaatatcgatccgaatcatataatgtggctggatggtaatacgtttgcgatggaatggaaggggtttgacgaggtgctgccgaactgcgtgtatgccatgcatgattactcagtgagcttcacattcctttcgaggtcgtgagataagggcgttcttgttctaatacgatataatctctagtcaatgggcttccctaccggcgatcgctacaaaggcacaaatgaacaaaaagaacgccttgaacaggggtacctgcgcaaagcgcgattcatgagcgagaacaagacccccgtctggaatggggagttcggacccgtctacgcagatcatatttttgacttcgatgccgagactgttaatcaggagcgatacaacctccttggtgaccagctgcgcatctacgacaagtataacatcagttggtcgatctggctctacaaggacattggtctgcagggtatgatctacacgaatcctgcgagcaagtggaacaagacactcaagccttttctggacaagaagagagacttctggctggataaatggggccgtcggcctaagtctgagcccgaggcggctttgaagcctttgctcgagtggattgaccgcgttagtccaactgcgaaggaaacttatcccacgtcgtggaatacggagttgcatgtcatgcgcaatgtgttttacactttcttagcggcttcgtttgtggatgagtttgctgaattgtttcgaggaagcagtgagaaggatctggaagaactggccaggagtttccactttgagagttgtatacagcgagagggtttgaatcgcatactcaaggatcacgcacatgggtctcattgattctgagcaagagtcagcttggtatagcatactataataaattggactttcacgactgattctagtggcctagagcctggagggaggtggtgctctataagcagagtgtggcaatagtatccgttcccggcgatattccggcttctacttaaataccacgcactattgttatccacacactatcgataagccagaaaaatcgaaaaagaccgcggggcacattctcgacttcgaggtctttaaaggttactagagagatttgacatggctgaatctcctgcgtatccgtccaatctggacagcatatacgatgccgcatcatctctcaaagaccgcatcgatccaatccgattgacgtcagacaacattgtcccgatcctcaacctgcccctcactcacaaggtgctgggccacgacgcttcagaagagtcccttgcacaggttgcaagcggcgagatctcctataccaccttcgtcgccgatcaggcccgcgccgccctccggtctagcgatgacttgactacggaacaaaaacaatcgcaacttctgcatcttggactagcagccttgttcagctttctacagtccaacgttaccggtcctcccctcgaattcagctcggctgaagctgtgcttccctccagtctgcgaacagaacggacaaccctcaaagccgtgcgggcaaagatcatccgcgatctaacactggatggagaagctgcctacaagctcacacctaacccggaattgttcgctgtggctaaggctctgctagccgatgcgagtagcgatggaccacttgtggcaaagaccgcacgtatgcgcaccaactttcttcaccaaaaaatgctttcggaggtcacgagtacactccaggatgtgatctacaaggatgttgagatcctggacaaggctgagttgacctcagatgagagaagtcggttcctgctggaaagggccattattcatacacaccatggattcgatgccaaggcacgggaagatattactcaggcggccaaggtgcggaggttcgaatttgcgctgaccggaaagatgggcaagcgtacaaagttccaagaccgtgatatcagtcaactggtcgtgttggctaagagtgccgatgagacatcaccatcacaatcttcggagccttctgggcctaagaacctgaacttggacgacgacacccttctcgaggcaatatctttctccgaccaaaagcccgacgaacaatccttggcaattcaggataaggtttctccagctttggatgctattgatgccaacaatcagcctattctcaaccccgttgactctgctcttctactcgcactggcatctgccattactaatacctcgcctgagaatggtctcacccgagaggaaacaaacccctacgccattcgagtgcttgatggtggtagctccaactggcagatctatacccaagcacttttggtccgcagtcgagtagagggctaccgttcccgtactgttgagagagccgtgctgcagatgcaggctttggtggaccaggtcattgcggataccgcaaccagcgacgacgcagctcagaatgaatcaggcgaccctacaactttcctgccgcgccctgagcagtctgagtctgccccggccgctgacagacttgagcacatctggatcctagacttctcaacaagatggagtctcgaggctgagcttgcgaagcgctgggttgatcttggtggtctacgcaccgcacttgagatctacgagagactacaaatgtgggccgaggccgcgctttgctatgctgccaccgagcgcgagggcaaggcgaagaaactcatccgccgccagctttaccaggccaccggcccagatgaaaatgacgaaaatgaacaattcgaaggaccagagcggtcaccactaccagcagatgccccacgcttgctctgtatcatgggagatatcgacaaggacgaaaagatgtacgagcgcgcctgggaagtctccggggaacgatacgcccgcgcccagcggtccctggcccgccattatctcacctccacaccaccggaattggaaaaggccgagatagcctataagaagagtttgcacatcaaccgcctgaaccacggtgcatggttcgctctcggctgcgtgcagctcgagctccagaaatgggcagaagcaaccgacacctttacccgcaccgtccaactggacgataccgacggccaggcatggagtaaccttgccgccgcgatgctgcgcatgcccgactcggagcccgccccagagattatcgacaaggccactggcgaagtctccgccgccgaagtcgacccctacaagcgcaagcgcgaggctctatcggcactccagcgcgcagcgcaactaaagggcactgacgcccgcatttgggacaacgtcctgacagtcgcagcatctatcccgcccccggcaacaccattccgcgatgtgattaccgcgcagaagcgcattatcgagctcgtcggcacaaagcagggcgaaaagtgcattgatgtggcgatcctgagcatgctcgttgacttcctgaacgtggcgttcgagtacgaggcattgcttatccgctctgacgatccatctgaagccccgattgttcgcaccggtactattcccggccagatcatctcgctgatcgatcagaatgttgtcccgcttatcacacactctgcggttctgtggcagattgttgctcgcgtcgaagtcttccgtcatcggccgtctaaggcgttcgaagctcacgagaaggcgtggcgtgctgctgttgctgctaatgctcaaggtgctttccagatgggtgatgagaagccctggcttgagattgtgcgggctacagagaaacttgtgagggatgggtatgctaagtttggtcctatggaccgtgaagatcagaagattgagggtgaccatgagcctgagcttgttgcgaaggactggcggttcaaggctcgaagtgccgtaagaggaatcttgggcaagggcaaagaattctgggatggcacggaaggctgggaccgcttgaagcagttgcagtctgaggttaccgccaattagtacatatatcccttgatgctgtttatgaatgatatagattagctcgctcatatggcaggtgcaatgcttacaaaagtcatataccaagttcaacattattcaaattccctcatcttgattgataaatcaaggctattcatagtcacagctagagtcataatcttagggaatcattttgattccaactttctcttcaccatcccgcaaaagctctcgaacaagacagtgtctgtcccctgggcccagcgaactaaaaccttcacctctctctcgtccggtttctgtccccggaccaaccgtatctgcagacgtacccccagcgccacctggtccggaatcgccttaaatttagccgcaccctcctcgccggcaagtttcattttccgacgtgcgaatctcgaccatacattctcagaagcgaatcccgtcccggcagaacgtgtttgattccaggtccagaaccaaggcaacgaactgagttctgtatctatagtcgcagttgcagtgtcaatagacgtgccaggtggtagagtgaatgtgtaatctgcagggaaaggcaaaagactcttcgggcagcccgggattccgcgcacaatattctagaccagcggttagacatggcgcacaaagcacagacgtgaacgaagtgagttagaggtagtaaagtaggacttaccatggcaggccttcggtctcccaatgaccacgccacggcccagcgcttcgtcttgcttccctgctcgaactcggtgacggcgaaattggtgattccatgcttgatcagcatctctacgagtacgttgatactgctcaatttgccgagcatggatgtgtaccactggatgcggtcacgcagctggagactctcgtcgatcatttgcttcacgaaagccacttctcctccgtgagtcaccatttcaacttccgcgccggtgcaggtcttcatgtaagttagaacggtatggtacgtaagtggaatgtggtggatggtatatggctatttcgtgttggaagtgaagcagtaacactcaccgaaaatgggtctcgttctttctgctcagcagactgcttcagctcattaggcgaggcataaaagggtgggttgcacatggtaaagtcaaggctggttaatggtcaggtaatattctagcaagtcttaactggagggagactcacgtttggtgacctagcttttctaacgggaataggggtccgttggggtcagaatttacaatctgaattcgtgatctaagattgttcagagccacattatgctgggaggtgcggatattgttcgagtcgatgtctggttggtcagtggatgccgaatatcttcgggctgaaggacatacctgttgctacaaatttccaccgcggccgtgtcgcgcagcccagaagtgggtagatagcgatgcatcccgttccgcttgattttgtcagacatgatccagagactggagggactcattacttacatatcgagcccgacgacctcccggtcccggtcatactcctcatgcagtcctccggcggtggagtcaaggaggtcatgtagccagaggatgtagttgagtctatgctacatgtcagacatatgcgtataggatctaagccgtcattcgggatgacatacctatttggtacctaaaattaagtcaacacgtgtccgtcagaatatttttagtatctgcataccggtggacacagtcgatcctcagggatctcaactttcaggtcaaaatcttgttgcaggagggtggtggtgagttgtctgcatgatgcaaatcagatccactcccgaagttagacgttagagtcctccaacttaccggacggccgctggatcagtaaagtcaagttgtccgtttggtttcaagctgtattcgattagcacttgtctttctgttagaacagaggccttttcacgtactgcttggcgaagtcgcgcgattgcagccccaaggctgcaaaatcgacgtcatttttgtagaggcttcggacagactccatgctatttcgtggagtttctcagtttacttgatattatcgaaagaactggaatgtggccggtgaaaagcaaagcaaagtccacggcgcatagggaggccggtgttggcaagcgggtagagaaggcgaaagcggccatctgaaactttgaccgcgttgatgtattaggcagaaaaccatatagaacatataactatgacctacgccaatacatgtaggttccagactacataattgatctcaggaagaaactgatatagcaaccagtagtgacagaggtttaaaataaagaaatagcagggtctatggaagatatatggataccaattaagaaggcggaggggaacgcggtaggttgaaacgcaagttccgggtggctgctatcgtcgagcctcaccttacgtcacccttatacgggcatataacctcaagaaaattaaagatgccgaagtgagatgctacccagatgtagtagtatttgccattttgtaaagacgtgtatgaaataaaaataaaaataaataatcgccaaaagtatgagtgagaagtgaaaccatgtaagcaccgctttttactaccccaaatcgtcaagtcgtgataggcccaattatatacctttcccccttctattcacaatttccccccatttttccattccagatatatcgatcgttttcatttagacggagctttccttcttcaaaaggcgctcttggcgctcaagacgccatccatagccccacttcatctcaaccatgagaagagggaccgtggcgaggataatgccagcgagcatgacaaatgcaaactgggcagtgagagcatcaatgatagcctgagaagccgcgacaccagcagcaccaatgaagcatctcatcaggttgttgactgccgttgcactagcactagcaccggggtacaagtcgatgacgagtgtgctgttaatggtgaagatagcggtggagccataggcaatgaggaattgtaggataattgggactgcaaggtgtgtgcggagggatactccgtagacggcgacacagacaatgaagatagccgtgatccaccaagtgttgcgcatgcgggcatactcgatggggaaatcggggtagctctttaagctgatgcgagtatcgatcggaaggttgtgttgctgacaatattcacgttccgttcgcttgtgattgtagtccatcaggtatccgattgtatacgagccggccatgcatccaaaaccattgccgaggaaggtcaggccaacttccattgagttcaggccatattgtttttcgaataggtccgatgtggaggatgtcaccattgaccacactgtgtacacaatgctgccgaagagaagggtgatgaagacatccttctcgcatagaaaggcgaggggtgctagcacggtctttaaggtcaccttacccttctttccgcaggggattgaaccttcctggacgtctttctgtccgcaaatggagtagatgactggcttgtggatgcctttgaggggaactgtgccgtttccagcgatagagcggagtgtttcggggaggaaaaacatgatagacaaaagactgattccggatgcaataaccaagaaccagaagatagatcgaaacccaaggtattgagagaggattccaccgaatactggtccaactccttgtcccaacatgcgaactagatactgttagctcagaacatagcagtgtatccaagcagcaggctacttaccaccaccaaatattccaatcaagctgcctcgttccgctgaggtggtaatatcaccaatgacacccgcacctaggaaagttagctaagacacaagacagggatgattaatgtatcataccaattgagatggtggctgcacttccggcagcttgcagcgctcggaaagccataagttcaccatagttggtagagacagccaaagcaatgttcgaaataatgtatacactaaatgttccaacaaaaatcacacgacggcccaatgcatcagagaaagaaccccagaagctcggggcaagaccttgaacaatcatgtatatcgtgatagtcaaggtagctagagacatggagatatcgagttcctatattgccgtcaacaagtggccaaatccatagtgctcaagttgaccaacctttgcaacttctgacagtgcagggaaatagatgtttgaagatagcggcgagaaaatggcggcgaaagagacaataataaccattaacaatttgcgagaccgagtgaacacatgatatggtggttcttctggggcttgggcttcaagattgattgactctgctggtgtcgatgataccgagaatcctttctcatattcaggcgagagattagggcttgagttgaccgactggtctgtaacctcaggatccctgagggtttctgctgaactgtagtgggacaaagtcatggtgaataattattatagaatatgaagacaacactggctgttatcaacagatgcaaatcattgagaatagaatataaagtatggcttcattcggctcacagttttagaggtatagaaagctaaatgatagaatggagacatccttttgtatctcaattccagcaggaaacccctatagggcatattccaaaatacaaacaatattaggagacccatacatctgagagtcaaccaaatgtactccacagtgggttcgactaggggtcactataccctctccttgatagtagaaaatggcacggataatacttatctggtaaccccaatgtcgctcaatttgatacatacgggccacgatcagcagttgaaatactcgaggttctaatccacgagcttctagaatgacttacaccactagtctagacggctacatgtctattgtatcatctctagtattagaaatatgacttctaccccagggaaatcatatttctgatacttctgggagctacccacgagaggttggggcctggttaactatggataaatagttttaatacctaagttcatagggcagattccagtacccactgggattccttctagactccatatacgcgtaatggaatcgatctgcatataatatgcagcacgcaggtccggtttcactctcaagacttggagtcggaaaaaatatgtcggggaaatgttgcttggcactcgattacttttctcgattcaactccgcagaatctttcgtttcctatgttgtaaaggccccgaaagtgtgcggaattagggaggtgataaactagttaaccaatccactaattgtttccaaagcagcagcggatagatatctcgagtacaggaaaagagaagctgaaacctgatttctgttccagggtctcattttccccacgtgtcgaatattagccattttgataacatatatgtcaagcaaatgccaagcttcatcatttaccctggtcaatattgatacaggtgagattattgggcagaatacgccattgaattacgtgtgcattccccttgaccgatctatataggggatcttaacccttgctgttgacaagtcgtcaatcggggacccacaaagggggcgtctgactacagggcttagcatcacaatccaatgacatgcattatgattccagatatgtgatactgcctacaataccgagtacattacggagtataattcatacagaggccggtcagcttggcgatcatatcctgtctagcgcgaaccttgtcccgagagaaagtcatggacgaacttcttctcctatacatatatatctagcaatgtagctagctgcattggtcagtagcttgccgggtaccatacagtacatagagagtacaatatactaggtactgtgcaagcttttctacatagattatagcttagtctttctatctgactccactgatgcgacacccctagaaatcttagcggaaccgccaagagttcgtcgtcgtctgcggttgatcattgaattgcacatcgcttcgtaattgagcgtcgactttacactttcggggtgtttttttatctgcccaacctccagctcggttaaggctggccagggctatctacccctgtaaggctgatacagcttcccatcttggcagcctgatagaactcaattctttatacctcagttttgatgcccaatgccaagactctggtttcacggcaagaacggtctcctataatctactccgtactccgtaactccttcgctgctgcggatgccgattctcgggtacccgatatggactccgttagtgcacgttagatacatgcagtgtagttagtttcattagtagattggcctgacatggtgcaattccccacttctaaacaatattgggggtccaaaccctcaatgtgattaggttatagcttcattttcaagtctccgagttattgtggtgttgaacgcctcgatttagcatattatctgtcaacgttgtggccccaatgcaagtttttcttctttttcttctagctgtggaatagagaattggatcttaactttcgaattctctcaaggttccttgaacaagaatttctatacactttactttcaaatttgggagatatggtagatccccctgacaggtatgacaatcttcatctgaaacacagtatacggagtaatcatatggatctaacgatactagcggagaaaataaagatgattgttacgaacggatgaggctgtgtctgatctatttgcctggcgcttcaataaacaagcgctttgaccatgggatttgcagatctgatgcagcccctggctttcttggcccgctaaaggaacttgacacacacaagctaactaatataaatgataaaggattccagagtgttccacgaaggttttgaggtgatttaccgcaaaggaaccctagcatgtcgttatcgcatcaaacgacgtcctcggtgtcctccgtcaaactgctcatcattttgtcttctcccgcctaagtgtcctctattaacagcaacgttacaagtgcctctcaaaatgaatgtaatggaccttcttggcatcatgccgggtccagaacaaaagacacctcgtaagtttctttcataccccacagggcagggcccttcagaacgcccctgatcgtcggcgtatggagctcgtgtgtagatctggcgattgagtaagttgttcctatgttgtaactagttagttacatatggatatcttaatttgatagtactgggctgtggaaatgtttgtttcaggataaccacgctatatgatataatgcactacccccccttgtgaaacatgctaccgatattatagaagaccttttaactatttagacagtatctaatggcgttatataatcaccatggtttaaaccgaagaaagtgacctaattgtctatgtttaatagcaagtacacgttgttctaggatagagttatcaactctgcttcggatgaaagagaccacagagacatatccagccagttttggataaaaatatacaagatttcgcaataaccagtggatatatatctcacctaattacggatgccactagtcagtggaagtgtagctataaattaaatattgagatgcgcgagcgaaagttcttgacacggcatgattgtcaaacggtttattatctctatcggatagatatgtcgcacctctaattcttcgacggctggggatagaaaatcaaagcgagacttccattcaccgaagccgtccgcattgttgatcacatttaacgcacagatcaatgtatgcgcacaagtcacgaagtctcgcttcccaaatgaattgatcgtgctgataacaccgtgaacatgcagttgggatccggaaacctttgtaatccattaagagatcaacacgatcgacgaagctttcgcgaacgtggacttgaacatgaaagacgctggaagaaaggccgggagcacgtatatcgggtgaactcgtaccatgtcccgaccaatgacaaggtcctggtgcgaaatttcacgaaatgtatgccaaatcaccagccgatttggacgtgtgttgagtaacgaggctcggctcggatgatcgaagtcgcaactcacgatgcgtgagagatcaaggccggagcggacatggcgtgtggatcatgcagccatctatctcttgtgttgaagtagcgtgggtaggcaatgtcacctaacaatgggagaagaccccatcgcaaatatcgtgatcttagcgcttgtcccctctgccaccaccgcggccaccgcctcggccacctctaccacccccgccgcctctgccgcctcttgttttgccctttcctctcccacccatcatacggcgccctgacgcctggacacgggcgatgtcgtctttgttcaggttcaaagtgcctcctgagaacctgcccacggaggatccggcaagaccccgctctcttcgcccgttgttgctcgatttatgtaccttgttaggcttctcgaggatgatgccgttctccttggcctcttggcggcgtctatcttcctttgattcagccttggctttgatgcctcttcggtgcgcagtgggcattttagtttgcgcatagagcgaagttttggctccgagggattgcatgcgcatatccaaagccttcaaacggttctttccagtgggcgccagatcattggcagagtcaagaaggtgtgactccttaagcagtctctgcaatgcaagatcatgcttgaggtttgcagagtcgtgggcgtcttcttcttcttcttttttggatgtaggctctgggtcggcgctcggcttatctaagtcggacaacagttttccactctgtaggtctcagtgttagcctggcccttcaacgcattgaggcctagcacgtaccataaacgccttccaggtcttcttatccattctgtcttctggtgccgcgtaggcatccgtgtgttcgaccacctcaacttgattgctttcgtcactgatatcggacaccccatcccagtcaccttctgactcagagaaatcagagtcatcgtcttcttcattccctatttcagtagatttggcggtaggagctggcaaatcaagtggctcaaattgtgcttcgaatagtctgcggaatacgtcctgcgcattgtccactggaggagggctgtcttccttggtttggggcttagaaaccacagtggtttctctttttcgtttcacaaccatggtgaatgtgctatcgactaaattgtaaaatcgaacactcgcgtctcgacccaaaagtttttcggacttagctcaaagtcacgtgtgataagatacgccgcccctcgatttacacatccatcactgaatcaacttgttctccaattagccagaaaaaatgactaaattcagaccgtgcattgacctgcattcggggcaggtcaagcagattgtgggtggtacactcagccaggtggccgcagacctgaagaccaattacgtatccaagtttccggccagccactatgcgggattgtatcagaagcacgatttgcgcggcgggcacatcgtgaagcttggacctgggaatgaagaagcagcccaagaggcattgcagacatggccgggtgggctgcaagtggccggtggtatcaccgataagaatgcgcaatattggatcgatcagggtgcggacaaggtaagcccccggattccagacggattactatttcttcgcctgaattaggcttggttgagaactcaatgatatatatgcttttatttttacctatttgcttgcgcttcgtcatagtaagagtccaatgacgctaaccatgtggaatgcgggcaataggttatcatcacttcattcctcttccctgggggcaagttctcgctcgagcggctggaatcggttctttctgctctgggcggcgacaagtcaaagctgatcctggacctgagctgccgcagaaaagacaatacttggttcgttgcgatggaccgctggcaaaccatcacagagatggagatcaaccagggtatgtcctacctgcactgaacctaggctggttcttagcccactgacattatgtagcatcgatcgcaatgttggaaccatattgcgccgagttcctaatccacgctgcagacgtagagggcctgcaacaaggcgtcgatgaagaacttgtttcaagattggctgaatggtgtactatccccgtgacctacgcaggaggtgcacgccatttacaagatctcgaaaaggtccacactagtagcaagggaagagtggatttgacgattggaagcgcgctagatatctttggcggctctggagtgacgttcgatgaatgtatcgaatggaacaaaacgcattaaaatagaacataaatcaaaatgaatagatcaaaaatattatgatgacccaaatagtatattcctatatctatttcatcaaagtcgtgacaacaaacagcaaggaggagtacgagtcacagttgtgtctagacttgtcccaaaggggcttaggggcttttatcaactgaaggtccgcccgcctccgtcttcaacctcaacttctctgtgtactagccgagctgcgaccacctctttctccgacacagtacctatcccgctctttttgaagcactccttacctagcatcaaaccgccaacatgaagcccgtcgtctctgccttgaacgcctggtcttggtacgctccccatcccaatatccatcgaaacgttctatcgctctaacacctcgcttctcgcacagtgtcattatctctgctttcgcaatcatcatcctctcggtcctcggctcgctatacagcgtacgtctgcccgactctcacttacccaagacccacgaagacccattgtcccggacatacgtaatatggggatcagccgctaacgcgaagttcccaactatagagcaacaaccacgcatacaccggatcggaaggcgaacctgaagatggccccgcagtcgccgcctctatttatatcgctgtgatggtctacgccgtacgtcactccctaaaccctaggctccaagctccgacgagatcgttcgttgcatgagaaatgaatcggttactgacaatgcgcctctttggcttacagggcttcttcgttttctgcggtctccaggcttaccttcacatgcgagatagtaggggaggtgctatatcactgcattaaaattaccttggttactttacattcgatgtcttctaacacgtttatctgtcgattttcaatctttgagcttatatctcgggattttgagtacaacacggtggcttaaattttatgcgttgggcgtgatgagaccgagagataccctaattctctcgagtatgaatcactcatgttcactctgtgcgacccagattcgtctatgttacagatgagcaggatcagactaaacttgaaaggcgttggcgggcaggtttcccggtctcctttgctagaatacacagatagccgacctgcgacttgtacatagagcgctcataattatttccagctctttgatatttctttttttttttttttcgcccattagacggacgcatctaaagataaattttggtatagacattcaatcatttgtccttcgttgagaaatcaagttttgtaagaccgccaacgccagtgaatgcataatcagatgccgaggctcagctggacacctgatttctttttcgttttctttctcgttttgtttccctccaggttattactcctcatcctcccatggatccaacatcttggacatgtaaggaccatcaaggtagtacccgagacgagcatagtagctacgcacacccacaccggagatgacgctgatcttgcgactaccgtgctcctcgcgcgcaatacgctccgcctcctccatcaacaaagttccaaatccacggtgctggaacttgcgggcatcacgtccgtgaagcggcacagccgaaccatagacgtgaagctcgcggacaatactcgtctgctggccagtgaactcaggacggaaggtgtgcgtctcactgcacttgcgcagacgaagcaatccaataagaatatcctgcttcgggtcttcgtatgcaaggaaagtctcccatccgccattggcggtgtagtcacggcggatcaactcaatctgtgatggacgaatcttgttcttgacttcgttgataccgacttctcgcgtgcggacatcgcggcaggtcgtgccaaagtccttcatacgcgccaatgccagttcacgcaagttgccgttctccacgccggaggtgacaagtggcatggggatatcgcgctggactcggtagatacgggtccatgggggaactagggcgagaattcgtgcaacaaggtcaatgagtgcgttgggtgtgtagttcttgtaacggccggtacgccacagttcgtagaggccggtgccgcggatgacaagagtgggatagagtttgagaccgtcggtacggaagttggggttctcgaagtactcctggaattggaacagatcgcgctccatcccaacgttcggcaggtcgggcatcatgtgactgacaaccttgaacccggcatctttggcaagcttgaacgtttcagctactgctgctacggtgtggccgcgattggtgtctcgcgcaacgtcctcgtacagactctgtacaccaacctccaaccgcgtgcaaccgtagcggagcatgctgctcagatgtgtatccagacagtaatctggccgagtttcgattgtgatacccacacacttcacgttgctcatttcgcctgctagcacggcctcgtcaacattgtccgtttgatatccgctcagcgcgttgtgaagctgggagatgaaggtgtcccggtaatcttcgggcagcgacatgaaggttccgcccataataatgtattccaccttgtccacactgtgaccgagagctttgatttggtctacacgtcctcgtgcctgctcgaacggatcataacgagcgcggatcgctcgcatcgaggtcggttcatatccagtatatgactgagtggagtattcgaagtcggagtctgggccaccggggcagtagacacatatgttaccggtatacgcgatgtgggggcatcgatgaggtttgcacataaccgccaccacggcgataccagaggaggttcctatggacgaggttagcgatagtccaacaccctcaattggaaaatttaaacgtacggattggctttgcgattaactttggtaagatatatttcttgtagtgctcaggcactgccgcgataatggccgtcagtggcggcgagctggacaagctgtgcttcttcgaaaaagtagcccgcaacttgttgagattgagatccttcttgggcttggtagagtctcggtttgactcataatcttgaatcagagcatttgcaatgtcggaacaagctcgcatgaatcgctcgttctcaggtacgttctttgcgttcttcttggcggctctcttgatttcctgcgaggtcatagtcatggtagccatggcgaagagaataataccgcgcctaggcgggaaatctttcaaaaaccaaaaagcacaagttggttatacttagtgggggtgaggttgattagatcgaaaaatgtggtcaccgaggtctgcgcccgaagtctgatccgcttaagtaaaataaattatgccgagcgaaaactcccgggtgtgtatcccgaacaccttgcccttcatccccatacttttctttctttcaacttacgtcttatacctcacctctcctttcatacatacaatcttgcagaaatgcaggccttccgccgtaacaccctctcggcccttcgaaatgtcggtgccacccagcgtcggactcaggccacctctgcctatagcgagaccttgaacaaccttaagatcaacaaggacacacgtgttctgttccagggcttcactggaaagcagggaacgtgagtggaattcccgcgctctcattatcacacaagtataatactgacatttgagcttgacatagctttcacgcagagcaggcaatcgcctacggtaaacattcatccaaccgcgatcgcatccaaacaatagcttacacaagacaggcacaaatgtcgtcggtggtaccaaccccaagaaggctggcagcatgcaccttgaccgtcccgttttcgccaacgttagcgatgccatgaaggagacaggtgccacagcctcagctatcttcgttccgtatgatcacacctatgctctccaaatatcaggaaaacaatgctaactacaattagtccctctcttgctgctgctggtattgaggaggccatcgccgctgaaatgggcctcgttgtttggtacgtggccgacggagcttccccttgtaaacaactttatctgacagcttctcgttcaacagcatcaccgagggtatccctcagcacggtacggatctatcgagtaccaattgaagccgcgaactgatcgatttatatagacatggtccgcattacggacattcttaagacccagaacaagacccgtctgatcggtcctaactgccctggtatcattgctcccgtaagctaccactccaactttctgcagtcattcaagcctcgccaattactcacgcatctcgttcatagggtcaatgcaagatcggtatcatgcccggcttcatccacaagcgcggtcgtgtcggcattgtctcccgttccggtaccctgacctacgaggccgtcaaccagaccaccctcgctggccttggtcagtctctcgtcgttggtattggcggtgaccccttctccggcaccaacttcattgactgccttaaggtcttcctcgaggaccccgagaccgacggtatcatcatgatcggtgagattggtggttccgctgaggaggatgccgccgagtggttcaaggccaacaacatccacaacaagcctgctgtttctttcattgccggtatctctgctccccccggccgccgcatgggtcacgccggtgccatcgtcagcggtggtaagggtggtgccgattccaagatcgccgctctcaccgatgctggtgtcatcgtcgagcgcagccctgcttccctcggcaagacccttcttgctgagttcgtcaagcgcgaccttgtctaagatcgtcgctcattttcatgcatcgcgtgtcttgttgttctggtttttaagccggggatctgaggtatatgtgccattttatacatggggtttatgggctgctcctgtattcttttttcctttgcgatagagatccttgaagtaatcatgctcgtgtaattattactgtctgctgtttttatagagtagatggttgaaataagtaaatatatgggaaccattcttttcaagtccgtgaagcaggcttcttggacggtccctccctcactatccacgactgaatcctcatacagacatccatagtaaaacaaatgaacttataagccagcacgaattgtacagaagagcagccgccatgcctcgtcaccgcagctagctgtcccagttctcgaataaagcgagatttgatgttagtccagtatgagccagggaaaggaagcatcgactgcaaaacacgcatcctgtcgcgcgctgactcactgtgctaatctctttcctagacaagtccctcgagaccttgtcgatgcggaatagcacacgcactcgagcatccagattgatagctcaatgtatcttagtgacacgagctctagagatcaagggaagcattcatagccttgaactaaagtgaacctagggagactaaataacgaaagaagctattatacctacaataggggggttgtattctttagcttgttatcgagattatttgatgagtacaccttttaatattttcttgtcctagtcggagagggtgaatataaaatgtcgaagcaagaacggttcaacgcgaaggctattgatatgtttgagattgtattccccggggccaaggctggtgaagagagaaccgagtccggatactcaagggggacgcaaagggactttgataaaatacataccatgactacttaatacggtaatattcaatacaatacagaccatgtaagatctgtagagaacaacaattccctaagaagattcgaatgtatgaactgatttatcaacatgaagtaaaataaatatccagtgaggtaccaagtaaccgagagagatagagatggagacacgagtctattctacagtaaaattctatgagagaaaggtagactgcttttccaacatcgtattaagcttctcaaattataccaaattccacatgtgattgttttccccaaagaaacctagaccatgctgctaccctctgatactcagccccgaagagggatcatcagtctagcaagttcggaagaccactttctatcttgataggggctacgtcccagcgactttttggcttctcgggggccccgttctgaaaggttgatggcacacacagcttaccattcgaaagacccggggctggcgacgaagaattgtcattcgataatgtctcacgcagacatgcaaccggaactttcaataccacaatacggttcttcgcttgagagccctcttcctcgtccatccatctcttcagggttatataagttcggcttcggccaaaattagcgcgatattctctgacgaatctcgattggttccagttttcgtgtaaatgagctttcatccacgcagcagccaccgatctctcttgatggtcggacttgtgatcggtccttcgcggccttctccgtgcttccgatatattgatcgattgccgccgtttatatgcacggggacgtaaattctcattctcaaagagcgtattgcatccttcccgcgggggacatctcgggtgtgatatgcgcatatccagctcgggggctttttgcgaggacctagggtccatcggaacggcattcccagagattgacgatagatccttcaagtgcatggggctcactgagacggctttttcaacgccttctggcagagaaacatgagatgttgacataatagcttcatcttctcctgttcgagacatcgaagacgaagttctcgagggcaaagaatttaatggaacagccatgtcaccagctagtgcggccttgcctccattattagagtcatttttcgtctgttgactggaactgtcgtctcctgtcccattttcctcctcggggcctttgttctctaggaccttgtactctgacatttcgtcccctgtctcatcctcactcgagtcttcagatgaactgtcgaaactcatgtcgccgtggtcttcggaagccatttccgatccgcttgacccattcagcgggcatgattgtgccgaacttgatgcacggagtctctctgggaaaaaagcggcctcaggctcatgcggtgtcaaatactgtgcctggtcacttgttggggtgggataagtcgtgataggatctccgaagggctgaagctcgctcaggcgtatcatcagtttttgtttcaacttttttagacttttcctatctgttacagtcagattgctgcttgcgtcaagtgtatgagtaggtgggagtagtaacattttgactcgtccttttcttcagcggtgacattatttaatatccccaaagtgatctccgcctccattagcgaatctgcgctgcttggcctcggactggaaatttggagggcatggcttcggcaaaactcgactctgtcgtgtacttgttgatcgaatttaagtactttcccctgaatggagcagtggtaggttccatcattttgtttctggaaatcgccgtgacgaacaatgtccaaccaaccaatagatgggctatctgcgtctttattccaggaagagggatcacagcccatatttatggtcagcgacctttccaaatcgtaactctgtagcggctgtttcgagaaatgctgtgtgaaggtctgagctgtctggaagacctcttcataagaccgaatgaagtcgcggcgatatgactggaggtcttcgaatcgtcgtattgggatgtctctccgcgacccccagctaatgaaatactgagagctatccatgttgttcgtctcaggcccttttgaggtcagttcaactcctcatactcggtgtctttctcatacaatacagtaatttgttccctctgttgctcataggggtttcgagggctctggtattgaaatatgacttttcctcaaaacagtttcaaagcggatatctgggtaaagaaaataacgcaaaggagaagggaaagtgttaaataataaattttagggtttctcgtatagcgtgtacggcgccgcactgttatcggcacccttataccctggtcactctggtagagcctgcatttcaacagacacactagagaatcgaaacatcgagtacggacatacgacgccccgcacttgtgtgattgggttcaaaggtcccgttgcggtgtgcccaccattacatccttgtcatacaggggtcggtttcctggtccgcacaggggtcggtttcctggtccgcacaggggtcggttttcaggtctgcacttgggtcggtttccaggtccgcaccagggtcagtgtctagatcgcagttttgggggctatctacatttagggggctgggagcaaatctctgctcctccgtatatgcccctcgttccgtacaaatccaggccagcgatgttctctgaatttcttcttgagcacaagtcttgacacagttttcctgacagaagtgtgtgtattccgtcctccgtatggagtacggcttcgcactttccgcctcttggctagattcattggtgttgttatcatctagattctgtactgccctatgattcaaaatagccgtgtttgacgcaattattgtgccttatcaaccgtcagatgtagctaatagaggcactttttacgttcagcttcattaacatatcgcgacggaggttgcatgatagacagagattactacaacataggctccaagcgtggtatatactacagcagttgtaggtctcttagttgggacttccgggtgactcgtggttttattagcgcagttttttctttgcaccatgtacttggctaatacttattatactaatgtattgtacatccaaggctttttattagcagtgcagctgatgctttccctttcgatttattaatttctcccttttgttgactttcgttgactttcgatgatcatcttgggcaaactttcacaagtaatatgccgggtataggctagaagccacatgatggacggcctaaggtcatagcaccgaatgtatacactagtggcgtcgcggtccctgcagacctaggctgcctaacgcacccaaaatgtacgaattcttaatgtgcgacggtcaacttgtcacttgtgtcgacgcagggaagtattcatgataccaatcctagatcaataaaggaagagagcaaaatcgttaaaagtcacgatatgacacgtctttttcaagggctataactagcccaggtgtaactctgatttgtcgatgagcagatggtactttgataatgcagtgaatgagatgaaattaggcgaaaagtaattctataattatgaaacagaagatttttttctaaaaggtagaaggatcgtacttttacttggaaaaatacgaagctgtcacatcacaggaatttggcggtttgataatgtatggtaccatacagtggtatgaacatgtaaatgacagtactgagaatttcaacttggaacggacatgctgacaaattgtaatgtatcgggacctcacctgcccggggttgataagtgagcagagtgagtcaagagacgagtgagtcacctaagatagtagtataaaagcttttgaagggattcgaattcaccactaataaacatcaattcagcatttggagtcctaaacaaaatgaaatcattggaatttacccttcccacggctttgatactgatagacaaccaatcaggcttctgcgatccaaagacaatatctcattgggggggcacacgatccaacccgggctatgaaaccaatctccaagcacttctctctgcatttcgagctgcgagatattccacgctgctggaggtaatccacgtttttcactcctctacaactccggagtctccgttccacccttccaaccccgaacagggtatgcgtcccctagacttcgctacccctgcctcagatgggtcggagccggtcttttggaaaagtgtcaattcgtcttttattgggactggacttgaggcgcatttgcgtgaaaaggggttccgtcagcttatcattgctgggttgacgactgatcattgtgtttcaactactgttcgaatggcggctaatctgggggttgtggatcggtatcttggagatggacctgtccggttgagatcggatgggactcatgagaatgacttgaaagttgacaaggggcgtattgtccttgtcgaggatgccacggctacctttgggaaggctggaattgactcggagactattcagaaggtttctgttgctagcctcgatggcgagtttgcagatgtattttccacagaggaggtcattaaggctctgagcaagatctaaagctagcgtgatagtgctgaatttagtgagactactacatctcttccactcaagccccaactattttctactccgtaaatttcaattatttagtcttcttctcacttcaggctctatttcctggatgtctacaatgtctacgagtcacatcacagaaacctggaccgacagattgtctctctcatccccgtgtacattgtgcatatgaacaaaataaaaaatatcaattagaactgtgtggcgggttgccactacatataaacatagttgcctttgtcgtggacaaggatagatcaggtcccagggcgcctctgggtcccagccccctcgcctttagactcgggtcaactctcgcaactcccccaaacccctcatcttctcatccaaccgcctcgtccctctactcctcctcgaattcccactcacagtcactgaggtcgtggctcacctcagtgctgtcaccctccgtgtctgatttcccccccatgtcactcagacactcatcctcgctctcctccttaaatcggagctcccacttctcccactcatcccactcatcctcttcatcgtcctcgatcgttggaagagggatgggttttgaggtgtccccatcagtgaggggccatgcccattggagaaggccatccattttgtcggcatagtcctccgcgtcgaagttgagtgctggggtataggccactttgagccggccattgtcgaaatacccatgcaaaactcgaactcgagcatcggggagaaatgagatgaccattgtctacatagatgtcagtcagtcatacattgtctatcatttgatggagcgtctagactcaccgggaagtcaagttggggccgctcatgtcggtggtacttgccgatttggtgcttgtggttctggattccactaagcatccatcgaacaagtactatgagctctccaactgaggggaaagtgtcatgatagcattcttcgcttgtcatgacggcgagttgatgagcgccctttccatcagcatttacggctcccctttgaacggtgaagccgtacttgtcgttgctgttgaagagacttttgtcttcttccatgctatattcgtcaacggttagtctcaatctgctttctatctattcttggggatgtagacttacgggatcaggtcccagtaaatgggggtgttactgcccctctgagatttgcggaggtacttcgaaaatgccttatagagttgatagtgcatctcttgggggacgaagtcttgatttgtcttcatcgcccgaacccacgtgaacgggtcgtccacggggtcctcggggtcgagagcactattggcgattttgaaggtggtgtcggtgtcgggtgtgaagaattggatgagggaacgatcggtattccccgtccagaaatccatcgggtggatgtcaatgttggaagcctgatttgggatataatcaggctccatgtggaggagctctttgtggagctgccgaaggctcttcttcttctctttgaagagccaaacccagagtggaatacgacacatcgtgaaaccacctggggatgaatgatgaagaaagaagaaaataaaaaggaagtgcagagaacgggggcccttttatgttctcccttggtcaaatcctggtctgcctccgacatccaagactatatcaactatgcctaaataagatacgggccaggttagacccatgggttcatcgcgtatctcaacatagaaagcttattcttcggtgctggactgcttcggacgccatattgggtagcggatagcttctgcttagatgtgtaccaattcaacaatatatagttataaatcggaacacagataccatggtataggaaaccctatattctccgaattcctttgcagtatctaaagttacatgaccattgatagatagttgatcagagaaagatcagaacaagatgaggctttagtgaagtaacgtgtatttcatagtaagaaggaagtgaaactaatttgaatgccaaatgccacgcaagtagttgtgtggtagaagcaaggaaggaaacagtttatctagaaattggaatatattgaagcgtgacggaaaatcatgcagcgcgtaacagaacccaaggttcctgttcaaggcctagatgggccatatcccattcttgacaaggcggaaaccatgtaggcataagcgcaggcggtttgctctaggattttgactggctaatcgcaatatatggccaaatgattgagcctataactcaccggctcttcattttagcggctgttgaatccagaacgcagactgcaatggcctttttctactaaaccattttgagcgtgatagttttagacacaccatgagtcggaggtccgggccgcaaccattttaagtaattttgactacgggcgtgtgcgctggctaaatgtttcgtagctgctcgtcttgaaatcattcatttcgacaactaatatacgccatgaatcctgccgaagacaaatccgcgcctcaaaatcccggctttgcccaactgggaatattcgtaaagctcccgcttgaacttcatttgacgatagggaaatatgtcttgggtgaaatacatccagcctctttcgctttcgctttggctgttctacgttgcagttgatatgtctatcaaaagatagcagatcggcttttcagggactttaaacatgagtttcgagttgcgggtagtggattgagtttcaacttcactgtcaaacaaacgcgcagccattcaagccgttcacaggccatcttcacacttttccttgggggcgagggatagaatttgggcctctatcttgtaagctggcctcggtctgtatagcgcgtcgtgggaggcaataagcgggcttctacgcgccttcggcattccatttaggccatgccgccattcatgcgtacaacctaccctgtaaaataacgaggtctccacaatctcttcgagtgtacctaagcgtccccgcgggctcagattcttcatggcattcagcacgggttctggcttgcctggtgtgaaaagctcagtatcagtcggacctggggcgacggcgttgatggtgatatccttggggccgaggtccttagcgagaacgtggaccatctgcttgacagggcccttagaggttaagtaaatgagatagggatggccaattgtggaagcgtgacagagagttgaggaaagaagaaagattcgggcgttggggcggaggtgagggagtgtcttctacaatcatcaaccttcagtttggaggacgtgggtgatatgggtaaacaagctgagatcggatggcacaatgaagttctcggtaacatacgctttttgaatgggccggtatcttcctaggctcgggcatctgcgcttctagtgcttcctagtctaaaatataaattgagacttgttagaatagcacaatagaccaatgttgtatattagtggctgtggctattcgtggatacgtattgtagttaacatatagcaagcactaacaatagaagagtggccaggttacgtctccacgatctaaagtgtgatcgaccataaagctacggagtagtgatagcatcaaaggggtcaggttcactaggaaacatctactcgaaccagattatcatcgccagtgatgcagaaagcgctccacatcctgcataactaactgcaacggtctgcgagacctgtcctggttctggcagacagttctttgacgaagctggctgcgagataggtgcttggataatgtctgctgtcttccattcttgaggtatcgaatttggtacattcgacagtgactttcgcgtccaagtcgcgatgatatgttgccactcgggcatgggaggcctccaaatgtctaaattgcggaaatcagggtctctaaagaccaacaaagcattattgacggaagcgaatttcagcacccattctagacaatcggaagtataaattcccggccccagctcattgtccaaggaactattgtgaatgaccggggtgaaaaaagccatcatcgcagctaaagctgcccgagtagacactcggtacaaaaatgagcctccgccgagtttacttaaatagtctttcctaatcttcgtggctaggcgatccttgttattatcccctttgactcgaattgcggaaatttcctgcggcagacgttggggtctgttggcaggaaacagctcctccaatctatgacaggcgtattggtatccaacctgaagtgggatgggatcaggccggactggcataacaacaacaggcggctgattgtatccaaagaaataccgatcgtacatcgatgctggaagtttgtcctcttcgaacagatgctccaagatccatcgtacaccgacatttgttgggatgagtcgcacctcatcttcgagggcaatcgctgggtcgttaattgcatcgaccagctcatcaaggcctgcgagccaaaaaatgctactcaatgggccgatcagttcatcaaatcctaaagtcagatcagcaaaatatcctctagctttcgccaaaatagatataggtctgcgtacgatagctattgctgtcaatgtactctccgatatcctcggggatcgttcccgggtatccatgctctcttgaccataccgggcggaatcctgcttccgccaactgacccattgtccgagcgagtttattccgattgtcggaggccatattctcttggataatgggagttgtaaaggggggtgttcctggcactatgctggctgatgaggaagttgagtatgtgagagatgggatggacgaaatcgaaggtatagaatcagtcggactgattgatgtggctgggctgcttgccgcagctggaaacggaaagctttcccttgggtccatgacttgatcaatgaattaaattagatcgcaaggagttgaattggattgcccgaattccattctaatattcctggatatatgcatagcttcgctcttaccaaaagcaatggcacctgccagtatatccgcatcttggtattgagtacaaatataagaagcgagggtcaggaaactacatgtgtagtgtttccctaccgaaaaaggagtcggatcttaacaccttaacatggtatcatggtccatggatcccccccggcttacgcctgacagaccgaagtctgacccatacctccggtgggtcagcactccctctatagacgatgtataccccgacgggttattttctagctgtagaagggagtcgatgacctcgaatctactgttcttgcttccagaagacaacttctgatgaaggcctacgaaattctaacaggaaaatagattccactggatggtacttaattctacaagaataatactgaagtctctaatactattcaggcaaaaggatagttaaacgaggatacggagaggtccttattagggtaggtcttcaagacggatcgacgtatacttcccttacaactagtttctatagtcctaaaggatacagaaagctctttggtataaataagctccttaaggagtaggatatcctacgagatacgtccgaagcgacttataaacggcgaaggaaaagtagtcggattcgtagatacttcctcgggagtgctatacctcgtcggtccctcggaggagaacgctagaaaattgtagtccttaattttttcgctagataatcgtagtctctgctttctactagaaaattgtggtctctgttttccgccagagttccctactggtcgggtggctggtaagacagtcacctagtaggtctagatccgataagtagatagatagtctcgtcccacgtcccttttctcccctcgctatctatcctatttctacttgaaatttacaattatcatactagctacctagctatttctagcggggagcagagaccacgattctctagtacaaatacctcgggtgcctaggtaacctatgggtacgcaggtgtatagcggccaacagtcggatgcctgattttgatggttttatggcctaattgggactagctctgataattttcagaccgcctttgacaccgcccaataccatcttttgtaagtacgcattgaagagacgaactaagctgtcagcattgggtaattcaaatgccttctaccccaccaataatgaagctatttcaattccgaaaaatgcattcaaacactggatagtaaaaagtattgagtaaattaaaagtgcccggtaattgtaaagggaaattgggataaacaatagaattcttcaataaatgcgacgccattcatacatctcggcggcccagataaacacactcctctcctacgtacgtcttccattcttcacctctaccactcctgcaagcttactctgaccactagcttacgtttctctcgaggtaaacccccatatgcctactactctatcgcagagtctgaccgatcctgtctagagtcgctatttgcacttctcgttgcgctatcctccgcgcttttctccgcgctgttcttcgcgctgttcttcgcgctgtcatctgccttatccgctgccatgcctcactctatggcagatacgctcgctctccttacccgggtcaaggatatcctattcggaatgctagaggttatcatcgctgcgaagagggtcctagaggaagtcaaggggatgcttctgatagctaaggatatcgccattatcaccggggagctattggccgctgcaggaggtctcttctactggggtcggtgggcccaatgggtacaggaggctgcgcgctcctggctccaatggacacaagctgttgagcattcctggctccaatgggaccaatgggctgagagtattcgatacaaatggatttatgaatgtcttcttatactctttattttccaatggagactagtaattaaagtaaagatccaattaatcaagactaaaaagattaaaagcggtaacccgattaggccggttgtcgtgatggtcctacccctgatttctctcgattttggagctacctaactgccctttatgcctccaaggattgatctcgagccttataaaggcgagatcattgatcttatctctcacaagactacccatgaagatattatcgctctccttcaagagaaatatcagattctcatcggtcttactactctcaaaagccgccttcgagaatggcaatgtccagtacgcactcagaaagccgatatccatgatcttattgaagagttactccctcgccataatacacaggatatactgaagattctagccagagagggcacaccatcctcagaacggactatccggagggttcgggctgatcttagtatcaaactccggctttctcccgaggagcgagagcaacaacgtgatgatatcgaagctattctcatttctgagagtatcattagcgatattgaagactttgggcgccgtactctacatcgtcatcttcgggcaatgggacaattttatactgagtactactccaacttttgggaagcctattcttactaaccattattatacaaataggaaacagatctctaccatttacagactcctccgtcccgacgtaattcaaggccggctccctggccaaaaacggcaaagacttaattatatgtcgccagggccaaatgatgtttggcatattaatgggcatctgaagcttgaaccattcggtattgagatttatgctgcaattgatggctactcgcgctttattgtctgggtctacatcggggtcagtgtcagtaccgcagtaagcgttaagcgccaaagtctcgatgcttttgcggcttatagcttccaaccaaggaggttccgctctgaccgagggacagaaactgttcttcttgctgatacgcaatatgagctccgaaagctaggtgatccatcagtacagatcaacgattgctatctctatggccggagtatggataaccagcggattgaggcatggtgggctattttatcaagggcaagcactggcgtttttcgggtaggcaatgatgatagtactatatgatactcgctgatatctatctaggattttttctggagcctcgcacacgataacctctttacgaaagactgcattcccgatcagatctccctccttgcgatctatatgccgataatccgacgccgagtacatcaatataccgtgcactggaaccatcatcctatccaagcccagcctcaacggccgcacgttatccctggaaagccaaatatgaacttctactactctgatgtaccggaccttcgctgtccaatcgataccgatccagactcaatgtcagaacaggcacagctattccgacatctacaacaagatgtggaagggtgggatccggatgaatatcttccaccgtctacacttgcctggtgtcagcagcagcttacagaaattggacagcaactagcggggatgccctttaaccccgaggatccgaatcctggcctcattggggatccacgggccccataccgagcggtgtatacagagctacgggcgcgagcgtttgcgcattggcatactggtcaagatccaatactcagcgtttatacgccaccgagaggtgcagctaattggcggccggataccgatgtctcgggagtcccagagagctagtcattactagaatatgggtagctttagtaaatgatattatttccctaatcttctccttttatcctttatccatccttcatccatccttcatccatcctttatccattctctattcatcctcgattttttgagaatggccgatcttgatcccaactttatagcgcggtttatgatcgcttggcggcaagtaaactcagctacacctccctcgagtgcacctccctcaggcgtacctccttcaggcgcatctccctcgagtgtacctccctcgaatgtgcctccctcaagcgcgccgccggcgtatgcaccaccagcatatacaccaccagcatatacacagctgttcacctcgggccagcttacaaatactccattctcggcgctccacaatacagtgagcagtaccaggcttggatacaatcggcgccagcatcaacaaggggtgataggccagcaagtggcggagcgggatatcccaattgcagtgaacttctatctccaacagtctccaggagagactgtaccaatccccaatggtaacatatctcttctttaataaccaagcaagccaaagctaatttatctgaaattatagcctcgatgctgattaccctccctccgactcagcgaatcggctttatcgacctttgggtcaggaatacgctattttctgcactgcccggaattatctgcttcagacctcggcttgaggataagttctaccttgctgaggcgatgattaagggcgcaggtaaaaagctggttcctcgatggatttcaggggtcgacgctgagttcgagggcacggtgaaggaattccttacaaaggttccagcaccaaaactacatgtggttgtcgcacggtatgaaggcgcaattgataattggccggactccaatattgtggtacgttcagctggtgaggccgaagaagtttcccaaacgcctctacccagctcgccgtctcatatatggataccacctcgttcattcggatcaccgcctcctgtcgcagttatcgaaagcccaacccgtccgagggcaaggggccgaaagcgagcccggccgcaggctgagggcccttcgccacgccggagccagaggatacggagagtttgaggttcatacggctggcaggaatgggaactttatgttgaaatccagacttggctttcgaaacgttttgggctttggtgtcagtggcgccagcagtttttctccggaaagtgcggagctcacttttcgaactttctgcccttggatgaaatcactcaacgtgttgttgtacgttccaatattattggaaccctctcaacacaagccgagtttcccctcatgtatttaaaggcctgcaaccatttggagaatatactggtgtttactatcggaataacctcttcagtgcgtaagatacacaaatgacgggattgtggcgggtgtgaatggcttcaaatgcgagagattcatatggttggagggggtatgaatagcttcatgtttcaactttcaagccgttctgaagaactttggtactctgctgactaggagatctgtcatggtaattcaggtattttaattttctgccagtctaaaactggtatgagctagtcctaattaggcaataaaaccatcaaaatcaggcatccgactgttggccgctatacaccttcgtactatgggtacatattcccgcctacattcacgtctcggcaaggtatattatattcaatgaaaaatattctagataactgctttgtgaatacagaaaatcaggaacccaaaacatatctatctatcgggcagaagatcccaaagccaacgccttctattcattcttttttgaggacgttttggggatcttccgcgtccgacgacgtagcatctccactcgttcctccatagtccagttgacttgatcaccaatggggatcagacatttagcgaggtagtcgtagttcttccggagtaggttcacagtgataaaaatataatcgacatttcggaagaccagagcgtcttccttcgcatagcggtccttctgcttgaggaaagcgacagggtgatctctccagtgacggcgcgggttcaagtggtgagaagtgtggtagccatcattgaaagagaatcggttactctgatatttgtcagtcttgattcgacgtgttcagcaggccaatggaaactcaccggaacatcaatcagtgtgatactggacaggtagtccgaattagggtcggctggatccacgaaagcatgctggccccagttgccgaccatcaagcccaagcgcataacggtgagcggaagaatgaacacgaacgtggtagcacgggcattgacgtagttgtaaagcatataaatggcaacgtagctgcccacctcccagaaggcgcatttgactgcatacttgaactgcccctttctccaaaagtacattgggagttccagccagatgaaaaatatgaaccggccgacataggtcaggaagtccgggatgctgtcgcggttgtagtacatggttgagctcaggtcgtctccgccgttaccctcaacgtgatggtgtttgatatggtggtagtagtaagagttccacgtatgtccgtgcatggggtccagcaggtacgggaaaagcgtgtcgaacagatataattttggggtcaggactccattcatgtggatgtgctggtgcttcatcagcgtgaaagcaccgcaataaaaccccataatgagccagtgcaaggcgccgtggaggtacgagaatcggtaatataggaatgcagcacttggcacaatagtggtgaagtaaagtataaggtgcgttaccatgaccacgtcggtctcgtatcgcacgatccctttcgcccagttgatgtatggcgtgagcacatacttctgaaaggaagcgggtagcttggccctcagcagcggggtatcccagaattgggagacggtgggatcaaattctacatgagagggatcattgagattttgaagcttttggactgtttcttcggtgctcagcttgtccaatggcggtgcatctttttggcctggacctttgttagtttgttatttgaccgacaatacaggggtattaccatctgagctgggttgaggctcaacaatagcagcaatcaccagtcgatcttggtaggtgagctggggatctgtgtatgtagagggatccatgatgccttagtacggcaaagcctagtctttatgttaatcctgttaaatataactcaacggaagggcactaacccgtgtccaagcagctgattgaaacaagcttctagaataatttccgggatccccgggtttataaagacaatcgaggcctagcaatacgctgtcctcctaataaagacaacgcgtcaggggcgcgaagagatttcgggagtcgactgtgggtcctggaatcgacaagctatgcgaagtgtccaaacaacagtttgaatgtttctaacacttgatctagtattttcaaatacagctcaagctttccatcgccatccgagagtagttggagatctcgctgtcgatcaatcatgattttgtgctgctccgtcacattccatccgattcagggggctcatggtcggaaacgttttcccctgaacatcccaccgacttaattagtggcgaaaagcacaacgaatgtacgattcttgatttaatatacgttgtatgcatgtggaatagtagcttggatttacaggaagtattcctaagttctagtctagtgaatgagatcattacggcaatttacttttctggggtagccccaaggaagatcaccactaaaagagcagttagctcgcctaggcatgacaagttggaggactaaaaacagaggtgactttcttctcatttacttttctatgctagaggacttcaaggaccctggtatacaatgccttgtctaggccgaggccaatgcactgtagaggttgacccgagaacctgaccggctctattcagagcactgacaaagaaataccggccagtccggttggtaggaacagatatctcagtctcaaagccgtctttaggaaatttccccaagaaagtggatgctcccccaccaccctcaatatcggttccatccaaagaccacgtagccacttccgtggctccattccaactcacatacactcgtccatcatccacggcaatctcaggcacggtctgaggatgaccgatccaggggctcttcgagatccgataagtacggatttctccgctgttaaagaatgtttcggggcctatatggacattgcagagcaaagatccgttcgaggcatattcagcccagtttgcgttgggtccaaagcctaggatgacattgccgctatccaagatctgcattgacccactgttctcggtgaggacactgttcgggctgatgtattcatgctgcaactgcacagtcatcttctctgtgtccaggaccaccgtcaaaccccgggttgaacctgtcacgggacggccagggcagttcccgttgtcgaaaattgaaacaatccgaccattttcgtggaaccgggcatggtgctgaccgttgaagtctgtcgctgcgccaccggataggtctttgaacatatttgctttccctcctagcttccagatcacggcgcctgtttgaccatctacatagacaacggagctcatcattcgacaggaaatgaggtaattgccgagatcgtctttctcgatgctgttgacatggaacagatccggcgcggtcttttcggttttgccatcgcccggctggaaatgatagtactcttcaaatctataatggtccgaagctcgccactcaaatagaacttctcctgtctggacttcgatctcctggaaccctgcatcgaaaatgaattcaacttccggtggtgcctcgaatgccgtttggttcaccggaaagacaccattgataactagaagtgccgtccctgaaggagtcagggttaactcgtgcgcatcaagctgccacccattgcctgaacggatctgataagcttcctcatagcgggagtttatctaaaggacattagaatattccctgatgtaatgccgccaatcggcaacttaccaacgcataataggttgagtcttcagaaagcgagacaacatagtcctctccttggaaggactgtatgtctgcggtgacatacccagtcgtgtgccaaacgagatacccttttgtatcaaggagcatcactcctgggatgttcacctgctttccccagtagggcacgacggtgtaaatgctctcattgtaacacagggaacttttgtcgtgaatgttcaggataggtccaatagcattggatgagtggtacagctggtgaggccatcggtcaaacgcgccaaggtcatatggtcgcgatcgatacagcgggggaatatcagccaatgactcgcatatcaccaagagcaacgccacgggttttaaaaacatgattggacatctcataatatcgtgggttaaatcgagacatggcagccgtatgggatatggcttttagccgatgtcgggggacgatcccaacctccgctgcagcgccaagcagatgtgcgcgggtgaaaccttagggaagtcttggtgcttttgttttggtggagcacctgcacatcggattgcttgtgagacttggaccttccgacctgcttgtaattgtcttaccgtggcttgtggtatgctagattgccttcttgtactccgtagaggctataaaatacatattagcaaggcacacgctcctcggcgtttcgaaagataccccatgatcgacatgatatgagttggttcgtgatgagagctgtttatttatagtcaggggttgcatctgaactcggagactcggcatattgcctcaggcttgcaataaataagcataacattggcaagtggaacgagttcattaatctgtaaacggtgatattacttcgagtcactataatattaggatttacagaagcaactttgaaatacaagatgcggcgaagttgtacttttacacaaagaacatgcggctcggataatatatccatcaatttgaagctatcggaagctgacggtaaatcccacctcttctctcagggcatgatcttctatggtcatatgatatgttggaaaaggcgttcctttgcttagaaaattttcagcgaatcgacgtccagaaagacgaagtaggtctcagccatcaagaggcgatgttgcaactgacatccaaagacaatatcctgagaatatcttgattatatcctgattattctcatagatgcccaaagccgaagaaaaatgtctcacttcccctctgccaattctctagctcctcgtagttcctcgcgaccccaggccactaaggctggatgcagtaagattttcgccaccttggcacatcaatggtacagacccaattttagtagttctttgacatcatgacctccagcgacaattgcaatatctgttggtgttgaggttaatggtgttgttagtgaatgtttctttctccgggacattcggaatgtaaacctccgacagggggatgtatacagacatggagatcgctcttaatttagaagaacaagtaatcaggatatcttctgcaaagacacgctatgatgcgtatctccacagttcgaaaaccatcaaaaaacaatccgtgcacataaagatcgctactttccctcctgaacgtcattttttcacatccaactcagaataaataccagccacctaccccctaccttcaactcccaacctcttaaaccaccctcttaaaccacatctttctcccataaccataaatcatcacatcaaagcctaagatgaagttcctcacatgccttcttatgctggctacctctgccatcgcagctcctatcaccaacaccaccaaggtgtcgaagcagttccaccttaagtccagcggtgccaccaacgcgaatcacaacaacctatatgtctactcctaccacacgggcgccggtctcagcgacgccgtgctcaccagtgatgttagcatagccagtcctatctacctgaatgggacgaacgcggtcgttgatctgaagactgaattttcctggggactaatcgccaccggcgacaccaactatgcctgtgagtatcgccacatactttggaaatttcttcgtgtcacatttcagcctggactaagctaatattttctttcacttagcttgggaacctatcgttatcaacgctggcagtggcggcagcgcaggctactccatcaagggcgatgccttccaatggtcggaaaacaacggcttcggtggctggcttggtaagaaatccctgcgcctttattcgttggcctctttaagaccatggtattaacatctctgtaatagtctgcgattggtaccacaatgcgccccagttgttctacttgaaccgttactatactgccaccattccctccagctgctccaaggtccagttgacgactgagtatatctagataccccacggtcgcttggggtgatttgggccccttttaggcacttaatgatcgacggttaggagtccggtactcctgatttttactagttaatagcgatttcagcgaataatgaatatgagatgcttgtcttttcgctatgtacattctgctagttcaaaccgggatatcaaaaataaaaaataaactagcagctgatcaactgcgtaacatcatgttttaacgtaaagcgtttcccgtttctttcctcgctgtgcccggtcatgaagctgcaattcctgcgatggggacacacgagttctcgtagtaccgcttgtccattccagcctgcaagcgcgcttcttcgttaaatggtccccggatcggtcccttgaaatgcttctgcacattcgaccggaagacctgaacaggatcagtcccctcctgggcacatatccacgtcaaccaccgatgaccagtggtaacatgtgtgatttcatcgttgtggataacctccagggtcgccacgctctcgccgtcgccagctttgcggaacttctcaatcgtcatggggttgacatccagacctcgtgcttcgtgcaccagggcgataatactgattctcgctcggagatcgtatgcggtttcagttgccgatagccacaaactgtggtgtaccgggagcgaaccgaaactagatcccatttcttcgagcctagtgcggagcagagagaagtgcttggcctcgtcgctcgcgaccttcagccagtcgtagaaaaatgcccgcgggagttcctgggacgtcccttttgtttggaatgtcgcaaagcggatgcagatatcaatagccagatcgatagcccacagttcgatattagccagcgcatggagcatagcaatacggctcttcaaggtcccgcctcgtcccgccttcggcatgtggcccggatcaaccgtttgcattttctcgcgcggtggctggtcaggcggggccacagtgccccttccaagcggcatgggtgaatcagaaacctccctagtcgtgaaaatagagaaaagatgcgtagccagctcgatcttgtgctctggattggcggtgttgagaacgtgggcagcccagtcacacagcgtcgcgttgtcgccgagataagtcgccataccgagatcatctggactcgcaggaagagaaacagtagtagtagtaatagcagctgccttctccgcaggctgcgggtgcttgagctgcactttctcactcacaggatcgacactagcaagtccgacgctgaccccatcctcagcggggaaatccagcgcgacgaactcgccgcgcacatccaccgggaacgtgcaggccttgataccaacgctcgattcaccggtctctacattgaaatcgtatgcgtgccacgggcacgacacgacatatgccgagtcctcaatgtcaaccgaggaatcggccattgggccgccagcatgtgggcattctgcctccatggcgtaatacgaccagccgtcattggtctcgttggatttcaggcttgatttgtcgatcgtcgggagccggaataagacaagtttcttgcctgtggtcaggcgaaccacgtaccgcgcctgtgtgaagtcggatagtttcccgcagttgatccacattttgattttggcaagcgtcgcttgtagcctgtttgcgtgattggatgggtttgtgaggcttttcgcttcgattgacttaaattatcacgtgacgatgtctatggtcccacctcctcggcgcgcatcaatatatcttgttgtaggccaattataggggcacctagctaggtacgctatataactagattatgttacagtgtacccgtctaattctaaagatcatccatcatcaatcttgtgtaaataataatgtaaagtacgtaaaatatgtaattaatatgtcatggatacggtaaattggcatggtaattactagtattcctggtacatataacgtactgtaaaaaaaggctgtacatatttaattagcaatagttataactagccagggtataaagtactaaacacctgcatcaattccaactaaaataaaaaagatgttgataaaaactaaccatagtaaaaatctagtttgtgaaaactctgcataggtgtcgaatatgtacggttgggttctcgacaacgtcataatatttatgcaactaatgattgagccattattcgtcttcttgtcggtttgcctgattcccctttctttccagtccaaaaatctgacttattgataaaccaatcataacatacagctggggcaagattactgaatactaaaaagattgctagaaaatagttaaatagcggtgaaaacatccttgttagatacgtaggctcgggatccagtcttactatgcacgagaaagtaccagctatcaccatgactgttggcgtttacagcaattccttcagaggtcaatgactctccacaaatacatagcccatcacaatgtgatggagcggcagattgcagcggattttagacgcctggttcccaaaaaatgtgggcctcgcttgtctcaattaatagtccgtaactttcctgctgtcgcagatttttccctttagcaggactatttccttataatatttaggctattgaaagccgtcttgcacttatataaatttggagcgacttgacttaggtagagtgtgaagttgaaaaatacgtggtttctgactggtattcatcacgtctgtgacgacttcccaaccaacaccaacacttgagcacattctgcgacaggggggttgaataggtctaggacaaataatacctagtgctcactcttttatttctcttgtctttctttgacttctcatctttccactttcaactcacgtttcaatccccagagcagtgacgatttttactccttaggtgagacactcgctaactaactctaaatgttttacgatagactgacattgtccacagaacactatctgaagatgaatactggtcccaaccatccgatcaaatggggaacgtgtcgagaaggcgtcctgtcccagctgcaacgatttgagtccctgccccaggatggcctcaagttaatggagtcttatcaggctgtccttgataacgatgagactttcacccaatatttctcagacaagccacttgaaagttacactatcgaaacacgtctaagggaaacattggggattcgtcctcctaggcagaataatccctcaatcagctgggtcaacattttccgacatggcagtttcgaaaagcaaagtgatggctcctactactgttatgatgaaggaaagctcgtggaaattgacaagtcccttcacaaatgcatcctactcaaccgatgcttcctcccgaccaactcgtacctgtggccaagtcctgccgacgctgaacgagaagctgaagtcactttggcaatcgaggcagatatcctggacgaaatcgacaaaaagatcaagtgtgcgtacttcccagactttttgacaaagctggtaagagacagactaatgaaaacagacgtggagaaattgaagcgacttcagctggctctgaagaaacgccgaaataagctccagggcattcgagtccccgtgaaaaggtctcgtacgccgcaaacccctgtacagtaccctacaccaaacgagtcacgtcgtcccacggtctccgttgagacacgcgatgcccgtgcacgcagttcatccgagagctcgggtatctcaagtggatccgacatccctttcgccgtctccggtgataactcaaggccactatcgtatgacagagatgatgcggctggcagctcaggccaagagcattcgaatctcatcgatcttgccgaaggcaaccagaacccacacgataataagatgggagtgtcggtggctagacgtcgcagcaacagaaatcctgaggtcgcaccaatccagcatgacaaacagaagtctaagcaatcccaaggagatgagtcgcctaaacaccagctcgatgacacacagaagtctaagcaatcccaaggagatgaatcgcctaaacaccagctcgatgacaacgaggacctggtgcaaccacctccaaaaaagcaaaagttcgagactgagccgctcccaacagatatcgtccaaacggatatcattccaacagacatcgtcccaacagacattgtgccaacagatatcgagactatcgaccttagtgaagaattgccaatgtggaaaggaaaggtcgatacgcccactaaaccgcagcccaaatcttccaccgggaagcgcataggacagaagcgaacacggaataacttcaccgactacgagaagaagcacgccccagcctggttcaagagccagatagacgcaggaaggctcccggccgatgttgagaaggcctatgccgaaaagtttggtgtcttccaccgcttcctcacagtgaagctttgggtcgaccgaatggaggaaagggccagtagagcacagcccccgagcaaaatcgtggtattgaaagtacaactcccgttgcagcttcatatggccttcttgaatgacaattcctcctagccgatccggaagttcccaacgagccgggcaatgtcaccggcagctgtctccagtactagttttccccccgcgccgccctatgtatctccatatcccttattccgccctaatgggctgccgggctcatccgtcgcgtaccagctggactggccctccaaactggctggattaccctcaactaagagtggccttccgaatgtgtactgataatgacctggatgtcggttattgcaggtcctctttcatgatatgactttcatttccaaggcccaagaagctcgctcacggtatgttccatcatttgagtatgttccatcatttgacagcatcgtgaacatcttactaatctaccttcctacagaattctcgttgagcgtgaaatttattttccgtttgtggtgtggattcttcgtgcagctggtttacacttattttcatatcgcctacttcatatgctacttaccttgtaataataccatttttactatttgaggccacccacctagttcccgcagtatcaaacggttccaatgggtagacgcatgatgtccatatgtagagtctcacctacatggctcccttcttcgacggccactgtcactcttgatgtaactccttcgacgtaccctatgattcactttctcaaataagtagcgcgtagctcttcattcaatttacacttcaacgatccacttcttcatctcgtcaattcagccccacaacccgttccttgatgcagcctcccttctataccgtctgacatcattaatgcaaacgcgactttcactaatcccgcgaaggcaaaagcaaacacttaaacttaccgccagcggaaaatcattcacatctcagaacagcctcaccaacgcctcgagcttggctaacacaatcatccggcttcggcctctgccagcgacccccgtaactagattcacaattttcaaaaaactggggcaaatacagtctttatggtttctcgatgtggggtctcaaatgtaagactcagtattctaggaacttacatggcttctactcaatctcaaccgccatgcatttcgatgcctttttagggctcgctctacaggccgctctcgttaatagaccgccagcattatttagtttgagtccatataaggaaaaggcacgccgaagtagtcaccttatataggattgtatcataataggtgtgaatcaaaggtgaaaggctcactcttgctttaacatgtgtattcgtttgactagtaaaccgcgtagaccgcgcgtttctacgactattcctcttgactcaattgttcctttctacttttcccaaactgtttgcctctttcgtcattcctgacatcgttccggtgatttggattaactgcatttattcacgtcccgaagctgtgaacgaactatggatcatcaccaccctcctacccaggtctcggaccaggtagcggcgcctagcttcttgtcgggtgaaaccgacagcatgctcagttcatatgtcgcactgcagagcgaccttgacgaggcttacaggaagtacctcggatatgccgacatcattggtagaggcgacctgatggcaccgctcttgggcgactcgattttctaccccgaagtagaaagaacagccgctagaatattcggcgagccacgcccacgcttggttcaaggcaacgtccaagcacccattgaatggaccgatgtccttcgtgaatcgctaactcctggggatttccaacgacaagaaaacggcatgttcctgtgccgcgttcggggaagtttgattgaggtttctgaggcgagttaccttgagatcctcaccggcgtcacagaacgactcttgcagccattgcaaaacttgtccgacgagcagaaggagactcgagcacgcctcaaactgggtgcctacctgcatcagacacacgagtcactcgtccaatgtaagcccgcccacttctatgacttgttcggttttcaaactaatgtgacattcaatagttgccagcgcagtgcgcgagtctatcattgctttgggtgtaaacccggctattcatgatatgcagctcagctccattggatttgctagagctcgactgcccaccccaatgtcggccccacccgtgactcctactcagtgggtgccctacatgtccatgtcccacacagaaggcgatatccatgagagcactatcaaagaggaagaaacagaattcgttcggtttgagacccctggtatccttggtagctatctggcggaaagcagacatcctgacagcagaggaagggttcaatctgcgcggtctgacgtttttcgaggtaatttcattgattctatgagcgagcgcaatggttataccccgtcatctgtcgacgatctgagttccattgatccagccagcagctcggattattatgcttcgtcaattggcatcactcgaagcaactccactgattcagcgagccacaggatcgcgatggatgcatatcacagtatggtagcggcctctgcttacctgaaccacaacaactatttcaatcccgaattgattgatagcaacgtcctctccgtcaacaaccatgcggtcgaaaacacggatgccaatgtcaattccgatgtcaatgcccgtactgaaccgtctaaactcacctcagagatgaacgttaattcaatcactccatggttgcgcgacattgatacttccagtgatgtaggcggcgatgctgaatcatttggatccaacatcccttggctggctcaatccgaggacgcatcccgtccggctgataccgctgcagaacaatatggaacgagataccgaggcgtaaagagaccccgaactgaatgttcttccagcgaatctgaaagtaagccaggggccggtacaagatactctccaagggaagaggccgacgggcctgcatttgtgaagtgtctggtcgacaaaggatctacttccgacgaaattgaagaacaatacttcaagattttcggggtttcccggtctgcgaagtgtctttgcaagaaattcgagatgaggggtacttgggggttgctgaaatctcaccgagaagctaagatgcagaggactatggtacgcagccgattactcccgtcttatatggaactttactgacgactcttctagtcatcttagtcctgctgtgatcgatacaggtgattttcctatggggtcggagcccagttggctaatgggaatacatatgagatggaatggctttggaaggaaacgggatagcaagggtgttagtttagaggatggtgaagacctggaggcatcatagccggtcatgaccactctcttaatgacaatttcctgatattacaagtccataagtccatacttaacttatcactagagtaaataatggtatgctcggtgtcagtatatggtatactccctagaggtgtacatagttagaatcccctacaggcgtacatagctagagtcaatctgtagtgtttttttcccattgtactcacagcaattagattggcctcgtgatcgaaatagagactgaggtgttccctatcctccctccatcttctttcttctcatcacctttctgttcatcggaccaacaacgcgtctcaacttttaaaccaaagccttttaccaacattactctcttttctgtccttcgcctgaacagttgccaccgtcatgggtaaaaagaagggtgtccatgttggcgtccgtgtcggccaaattgaagcattgcactcaactcaacctggaaccaagcactcaatagaatccaaggttttttccgaagaaaggaagtcttcggccttcggttttgattctgagcttgaaaaggctctcaataagtttttcggtggtcctccttttttcttgattctacctgataccattgagggccactccaaaccttcgacaggcaagagagcgtgcaaaggccgccggcacccaattgtcgtagttacttgggtggatgtactttctgaagcaacaaccgcaagtcaatttcagcgccagaaaaatggcatgtatcggtgtcatgttaaaggaaggttgatcgaggtgtctgcggagaattaccacttcatcgcattgggttacccccaacgtatgatgaatttttcatatctgtccgaggcacagagagtacaagaggctgctggagctgtgagagaacaagacgccaaccctttcaatgatggcgtggatcgtgagtttgctgtcttccctggtcagttatctggatactaatatggaacaacatgcacagagccgctcaactccgcacccgacccaatggacatgacccgaagctcaattgcagatcttttgcgtcaaactgagaagagtgccatggtctcataccaaagtgagagagatgtcacaggaacctgccatggtctcataccaaagtgagagagatgtcacaggaacctgccatgtggccgaagaattccaggctgaaacaacacggcttcgccccaaccacaggcaggttagtctccagtctcatcgcaagcagggtttctctagtcggactcccattttgatggcaaacaacccagtcagatcagaagataacctgatcagatctgacgttccaacccacattgatgatcgcggggcaggaagcttggatatcctgaaacagtctcaatccgaaacaagtggtcccggaaacaagaacaaactcctagttactacccatcacgagagctcttttccttcttggaccccctctccgaagaaagaatggcgcgtgcgagagggtccagttgcatccaatacctcccctcgtgcagcgccgactattcggtattcctcacgcgaactaatcgagggaccagccttcatcaagtcgctcattgagggcagcacatcgtggaaagaacaggaggagctgtaccaagccgagtttggtgtttttcgctcccagtttagacttgtcaaaaggttcggcctggtcgacatgaaaaacggcggctttggcaagggggcgttcaagaagtcgtcgagacaactcaagtctcaggtatgatatcttccaatcactcttaatccgttctctctcttacttgatcaaccgattaacatctcttaacagtcgacctacaccaacgtggagcgccgggaatccagcccgattgaggcttcccaggccatccgccgggcgcgggagaagaaaagggacaaggggaagaaaagggaccccggcccttccgaccctgcgtaggtcagtgattcgaggtcgggccgggggcctaaattgctagttcgaacccaaatctcgacaaacgaattgagaccccgctagcaggggacagaaggaatatgagttttgggggtgatgatactccctgaacatgtgtaagattcagaaacagaagcacaatgaaagcgtacgcaaaagtgatgatgcagtcgtaaattaagttgttaagtacataaggtataataatctcggagtcggaactcaacgtttcgttaataatagagaactaggttcattccacagtggacgtatacaacaaataggaaaaagaacctcatatccaccgtatatgcttcaaaaatgtgttcttacaaggcgagagcaagacccagcacaccaacggctccagcaagactcatggccacaccagtgggggcggcaccaccatcggcagtggtggatgaagcagagccggaggccgaagcagaagccgcagccgaggacgaagcagcgtccgagccagtggcagcggaagaggaagatgagaccgtggtagtagaagtagaatcggtagaggacgaagcggcagcggcagatgatgaagcggcagaggacgaagcggcagatctagaagcgccggagctagcagcaccagagctagaagcaccagagctggaagcgccggtggaggtggcctcagcagtgctagggccagagctgcttgcgcccgagctggtaatttcagcggagacggatgatgcgaaggaaggatagtagccctcaaccgcggtagtaacgtacgccttgacgctgtcggggaggctgctgtaccaggtcggccaggagttggagacgatgccttgctcgacttgcgaaaggaaagcagcggtattggtggcttcggcccagaatgagcttgggacagcagttgctagaaccacggcaatggaggggggaattatatccgcgaggccagcgtctccggattcaatagcggagttggtgtcggccggggcggccatggccatgctggcgaggaggagggctgcgagagacttgggctgcatggtgacggttggaggaagtatatactcggggtagaaggaggagataaaatggttgtgaagacgagctatctctggtgtaattgaccaagtggaagaaaaaataatcagcatctgggggctttatacctaatacgcctgatgcggaccctggaaggcaatgcgaggctgcggcatagcccgaatgagaccatcgcgctatgttcccgcgttccactagcaacggccaatcgcagcctcgtcgcccccaaaagttgtcgatcaaattgaaaggttgcacctgagatgttacgagaaatcttatatagcgcaagcattcgcctaacatctccaacgttgggggctactgtaggcgccctgctgcgaaattacccgatgtacgatgtagggctagaggctaactaacgtctctttttttctgatttcggaactcatcctctgtacgagtcctggtattcctcagaggatactacagtgaattgaaggtccggtgttctatccgttcgccaagtcccaagaccgcattacgcacgcctttttgtacggagcacaaggctctccatcattggattcggaggctcttgaacgtgtttatatgacgtcatttcttgggggcccttggaaataattcttgctgcctttgtctgtacggcgtttgactggtgcttgggtggtaatatccccacctgtcttgtgtatggggttagcggtgcaattcaagggttcaatcagacgacatgttatcgaatagaagtttttattgtacgtaaacacaacacagttatatgcaccgcccattcaaacatctcctcgatggcaagtcattggcacaaggcatccaatagggtctacatcatacacagccgtgccccacctgggcacaaggctgtgttgggtaaaagaccataaataaccacctccatgtagtgagactctagtgaaatcgaatcagtctacagcattgctgcgacatattaagttgggcctgtttgagcactcgccactagtgcttgggacgttcatatagccactacattctcggcattcgtcatggtcatgaaccactcgggatcagtagctagtatcttctatctatgttttaatatctcggttaatttatatcgctgattgatcacacctatgtatgtctgcatatatgtgtagggggcactatatatatatctggtgctaacggtaatggctattgttgtgccacttcgggcgtgagccatcgaactctacatatatatatatctctcgcagcgatatatcaagcgtgaattcttttctttaaagaaatataaaggcaatggattccgcaccaaaaagtattgccatttaccgtcagaccaaggctattatggctccacttgatgtgttgatgtctacaacgtggttttgctggcaactttctctattgatatactacagcaatttcaacaatccgagacactccaaacgaaatcgttcaaatgaaacatcgcaatctcattttgcatccagttcgaaggaataggatagatagaaaggacaaaaaaaagaacaaaatcgcgcacttctgcctgaagaaacgttggggctttttgtttttcttgctgaaaatatggccatcataagtcagcctaaatgcgtcagttctatgcgtaatagaagctcccatccattgttcaatgtaagcttaatgaaacaagtctaaaccgaaaaaaaaaaaaagaaatctctccctcggggaatcgaaccccggtctcccgcgcttatcggttttaatgacaagcggaaatcatcaccactagaccaaggaagaatgcgatgaccgagttactgctcggccacttggctggttgatgcaaaagtgatgaagcgaatgacatatgtaccacacattcgcaaatgatactcgttaatccatgctctcttccaatcgtacgcagtctattggctggtctaacttgcaagattgcaagcaagatcccaggctatctgaccaggctatttctattctccgtgttagagatagtccgccctaatctcaatccccaccttgaatgttctcaaacggaaagtcctggagaagtccgggtctttcagccgacttccccgcaggaagaaataaaaccgttaggacgcgcatttttctttgcggtttaaaaatcacaaacaactgtcaattatgacatccgttttcaagaatgggcgcatcttcgtgccgtcgcaagctccggataatgaggggaactttgccgagtgcatgatcatcgagaatgacaagatctcgcacgtcggctctctcgatggaataaccatcccagaaaatgcaaatgtcattgacctggaagatcggactgtcattccaggttttatcgacgctcatgtacacatcctgcattacgggcagtcattgcgcaaagccgatctcatcgcatgcacctccctcgatgaaatccgcgaagccatcaagtcctacgccgaagccaatccatctctgccgcgcatattatgccgaggctggatccaggcatctaccaatggagtcgcattagcaagtatgctggagggtatcgacccgcgtcccatctttattgactccttcgacatccactccatgtggtgcaatgcagctgctctcgatgagatgggggctcacacggcccccgatctccctggtggaacaatccaccgtgatgaaaatggacgagcaactggcttacttgacgaatccgctattatgaaccttgcatggccttatctagaaagtcttagctccacggaagacaaactgagtgcgttggacactgcagttgctgcgtacaccgctgccgggtataccggactagtggatatggccatggacgaaggaacatgggagattctgaatctctaccgtcgcaatcataccatcccattccacatcggcgcccactggctcgtccctttctcagcggatcaagacgccaacttcaaatacgtggatcgagcgattgagctacaccaccagtacaacgagcccgatttccatgtcctcggaataaaaatcatctgcgatggcgttgtcgacggatgcactgccgctctcctccaaccgtacaccggtaaaacagatcgcgtcgagccaatctggcctgagaatatgctacaagaaatagtccagcgcgccgactcagcaggcatccaatgcgcaattcatgcgataggcgacaggactgtgaaccaagcaatcaacgtgctgtcgagagtcggcacgccaggccgaagacacagaatcgaacacctggagatgacaacctccgaagacgccaagcgactgggtcagctgggtatcacagcctcaattcaacctgtacactcggatcctacgcttttcaaggcgtggcctggtcttgtggggcccgaccgctgtaagcgcgcattcgcctacaaggacttcctcgatgggggtgctcccattgctatcggcacggatgcccccactgcggctcattttcctttccctaatctttacaatgctaccactaggcgctcggcgattcagaccgagactgatgatactgtaaacgaacatttcaagttggggttgtctgaggcggctactgctgctacgactggtgcggcttatgcgcgacatgcagattcctggactggaagcctgcggaagggattatatgcggatttcttggttgttgatatgcagtggacgccggagtcattgcttcaggcgcgtgtctgccagacttggtaccgggggaagaaggttttcgactcatgaagtgattgatagcggtagcctatagacttgaaattagatagaagaatacacggatgtacattctctattccttatgacgtcgggtcttgtgatgcggggtggacatcacggtgacatcaccgctattgcctcacaacagccatcaaaatgtagatgtacaacatacagtacagcacgcaagtaagatatagaatatcaattgacaatttcttaatttggagtcatcgcttcatgaagacatcactactagttccgaactaagtcttccctttgaaacttcagtgtagtcccgagtacaacgaagtatacgaacgccaattactggtcgagttgttcggggtgctcttgcagcccacggtcggtacttatatcagagaggaatgaatctgatgtttgtcagtacaaaagctttgatctcaagagtcgtagtcgggggtaacaaagacatactgtgatctacgtcctgcgaagaagaccgacgtggatattctggggcatgctgatgcgcaggctgtggggaaactgaagttctgtttatttgaatcagtcagtaatgggatacttcggggtagacttcaaaaattgtgatataaacgcacggggcgacatcactgtccagcatgagatcctcactcctgatattggattggtcttgctgttggtgctccatgtttccgatagagctacggcgcttttcgtaattaggatctagggggttgtgatcaatatccgtcttgaccatgttcgaatttagagtagactatgtggtggcaaatggtggattggaggtatgtgaaagtgttagattggggaaaataaactatttatcttatactacgtacgggaagcctccgatgtcataagttgggcgtggcaaacttatgatataaacaatccatgcggacgcggacctatcagagtcatcgtgatcctggtatttgaacaacgaatgtcgcccatattgaatattggcggcgaggccatgaaaaagagttgagctcttgtgatactcacttgaagtcgactgactcgttttgcactgcgaattaatttatcatggccgaaattgtatgaggtcaagtgctcgtcaatgtacgacacgatggcaaaattagtaatattctgggccattcgattgtagtttaggattgcgaaatgaaaggacaagtggaggagaggtatgagaaatatagatgtagtactaatactcgctggttcatcgtctatacattttgatctgtcgtctactcttggtatatgacctttctgcttgctagcttagcatcgagttcgaaccaccgggggcaaattgcaaggcgtcaaaatctcgccggggagaagtaatattcagtttccaagtatgagacaagtcagcgccatgtcaacaatttgtggcggccctcctcgcaacatacatacagtcacaacagtgagatgttaggcttctggtgagtgctgcttgtgatttcggacacattgccatgaccttttggtctcacgaaaagacattcctcttgggataatatacctcgaattgttttgagagttgagaatctcattctgggttctttcctccagaaagtttcccaccatgtcattcattcatcctaaattcattccgcagccaaggtgacaggccatttgtcatggcacgtatattccgcggtgtatttcaaagatggcggatattatatgacaacagaagggattctgttgctgacattctggtgtcaccaatgggtcattggcacgaccatatgagtagcaatgtcgtgctgctaccaaccgaaatcattgtagtttgagccgaatgaagattttccctcgtagtccagtattattcccgactctaggaggtctggctcacgttggtttgtccctttgttgaatgtagatatttgccagggaagcagttgcctaaacaggaaaacacactagtaccaaaccggaaatggaatgcgatcacaggaatagagaactccgatccgaatttgcttctgcgcccctggtacggagttcatgatcaaatatctcgaggttctagaaaccgagatgcggctcaagcgaccgttaagtgctattaataggtttatgattacggaaggatagccaaacgtatatattgtaggaaaagtacgctatgaaatgactgacggccgtgacaatgacgaacaaactcaacgagacaatactacaccagtcactgaaagagtcactattttcctaaaaacctcttgattgatgattgaagtacggagtaaaaaggccattcttggcttcaaccccactacatcttggcttcttcatacagctaagagatccgatattgaagctgctagatcgcgaaccgcggaatgcacaaggtcccctctggacccgctggacggaaatcgtctagctcgaggtgtatcgtgcagggtaagccgagcatgattcgcctcgggacagggccgacaaagccaatgtggggtgcagaagcagatcatttagctaattcttcatctaaccttggaagcacatcagaagaagacccggtcaaagcaacgtcatgaaccaaccacgttgtgtgaagttgaaatcgaccccggggcatgttgtcactagtcctaatggggctattgtctggagaagtgggtggagagaggatgtcactgttcggatcctcagttgacaggcgcacacaaattttttcacaggtttaaagagagcgggatttgtcggttttctgaaggtttatgcttgaagtaattgcattgctgtttgcgactacgatctatataaaaatctttgaggtgaaatattacatcataccttcaaatttggttttggttcactctggatccggaagagaaacaccaaggctgcaccaatctataccagccttgaaaagtgtcaactgagtcgcggtgggatcggaatggtgttcacacgtggcgatatatccggccacgatgatcagacaataggtaaacccagaataccaccaaccgagatctagaatattaactaacagcgacatagatcatcaagatcctagcaaagatgtcataattgtgtcctgggatgggccgcgagatccaggaaacccatacaactggtctctgtgcgagaaatggcttctcacagccctcgccgtgttcgccaccttcatgaccatgatcaacggcacaatcatcacagtagcccacgatcctatgaatgagcgcttcaacatttcagatgcccatttcccacattcatactggcccgtcacatcgtgggccgttggcggtggctgtttctccctgctggtcctgccgctcatggaggatttcggtgtgcgatgggtgttcctgggcacgtacgtgaccttcatctgttttgtcgtgccccaggctgtggcacagaatttttacacgttggtcataacgagattcttcgccgggggttgtgtctccatcctcgccaatacctctggcacggtgattgggaatgtctgggacacagagctaaatcgcaacgttcctgtcagtctttttatcgttgcctacctgtcgggtagtagcattggccccgtcattggggctgctatctaccaggctctcacgtggaggtggattggctatatccagatcatgtggtatggcgctttcttccctctgtacttctttttgttcagagagtgtcgtggaattgcaatcctagggcagcgagctagggctctgcgacgtgaaggccagagcgcttatacccagcatgaaatcgacacacaaggccagtcgattttgagtattgtgggccacagcgcgatcagacctctttttctcttcttcaccgagtccgtggtgtttgtatcgacgctatggtccgcctttaccgtcggtacgttgtacctattcactcaatctgttgagcaggtgtttgtagccctgtatggctggacaccagcacaagctggatacgtccaatcagcagtcgtgatcggagaacttctgggatgggtggttaccttgttctcaggcaaactttacttcaactcggcatcccgcaacaaggaaattcccggtacgcctattccggaggcccggctgtacctcgctattgtaggcggtatcttcggcatctcgggtggtatgttcacatacgcttggacctcataccccaatcttccgtggatcgcaccggccgttggtctcgccatggtaggggctggcagtgtcattgtcgtgacgggaatttccgactatgtggtcgatgcgtatagcaaatatgcaggcagttgcatgggtatcattgccactggtgagaacaccctggctgcgttcctccctctagctaccatgagcatgtattctcatcttggcctccgatgggctagtacgctactagctttcattgcattggctctatcttttgccccgatattggtgctgatatggggcaaagagatccgtgcacggagtccgttcatgaaggaagccatggtggaaaagaggaggaagagtatcgactcggtctgacgaatttttctctgtacacaaagcgctatgaggaacatattgcacatattaaagatttaagaacttgtttgttcactgaatattttctcgtgtttaagtttatcgttctcccttcagggctgatgcccgtggacaagtaaatcaagaccatcctacgccccaggagtttctcaaaggcttagccatggggctttgagacataactagatagattttagtttgctctaacctaagatctaaatttaaaactatagccgacattctcacctcatgatccccctacttaagcaagaacacttggagagtgaactcaagactgtaaacttcaagcgacaagtggatcaattgtaagcaatatagtttgaatcagggggaattttcatagaactactccataaatgtcggagatattccagattgcggtttagaccagtattgcgctagcccgaaatgaagtcccccccttaacctcccactatatgtccttccacgtttgtttttcaaggccctcgaggcgaatgattattgttgcttaacgttatctcccgagaagaatatatctgtcagccacggacggaccagctagaaaaaaaagaagggaaaaaagggggaaaagcccactgtcctctgtatcgcaacccacgatccaactaccaagttaggaataatagccggattatcccgttagtcctgctccccttcaagaacgaggggtgagacaggctacgaatccgcctctcttcttcctcaatgagaagtcgtcaaacaacctgtttttcctcatgaggttgcttgcatgagtcgaggaatgacatccccacgtttctgtcaattgtcgaattctagatcgtttcagggcggacgatcaaacggtttgattgccggtgccctgtgcgatggtctgaccatgtacatatatagagttagtacggagtttatactgcgtttgcactagctgggtacctccgccgagactatcagctagtttctcaggggctggaaaaccttgattggagttgaaacctccagccagagtctatattgattgcatgagaatcgtggatggttagttctcgatctaatagcgccccattgagctagatacaatacatgctgtttttagttctttttcggtgtcttactttttggtttgatagtcgatatggcgatagtcgatacaatatatagatcagtcgataagagtagtcgaatgcaaccgtctttttagttcgacgatgagacatcctgacacgtagatacgtacactgatctgataatgatgatctatgtggaagatgacatgattgtacattcctgttcttcggatacaggtgtgcaaccatctcaaagtaccaagctcctttaggctactgatctcattgaaatctctgatcaggagaccgtacgcgacgagtcacagtagtctaccgactcacatgctgtggggtgtatccaaagcttggaattatgtcaccctatagaaaccctacggtacctgttacccatgtggtctagaactttgctcattttatttatgacatggctggctggggaaaagtggaccaggcacagtacaggtacagggtaaagatatacaaatacaaatctgtttggcttggttttgcaggtagaaagcactcaggtataatattgcgtctatataatataaatataatataaagttactaatagatactacgtgcccaggtggtaacccccactccgtattctccccattagacgagtcccatgcggcgggctgtggccccaaacgagatcagtcggaaataccggatgtacaatccaaagcacagtctacatacaattaggcctcggagaaaataacaggagaaagtcgggaaggtttcaatgcatgtaagcgcccactacacttctgaaacaacagggcgggtgcttcacatcgcagcgccagtttgatgagccttggctgtctccacctatcccgttggactcacagggcttttggccgaaaaggatatctaaatatggcaagtgatatgtttatcacttggttatgcagcctgatcaccatgtggattgggccaatcatgaattttgacatacaatactatacaaatatacaaaggggggtatattcgctttgataagaacagagtcttggtttgatatattccaagactaatggctattgcacttggatgtatgtgttgcttccaagaccatcttctctatatgtacggagtatcatctgggcatctatggaagtatatgggatgtgtacctgaccccgaataaactgatttccccgttcgaccctgtaaatgacggataaatacagcgtaaataaccggcaataccagattaatgacataaataacataaataacacccttggaccattaacaaccattattcaggcctccgcccggtatgactaagaataacccaaaataacattactagtttatgaccggtcagacgtccctgggcgcttcccccattcccagcttcgattattattagacttgactgtatcttcttcccccccttcttcttcttcaccaatactcgagcttcttcttcactttcgtttctttcttccgctgcgcgcgaaaatccccagaggcttaccggctggtccagttccattctctgacaatctctctttctttctccttgtctacgaggctggttcctccgttcccttagcctttcgtgcattccttgtgtgatctagaacatctcccgatcggatatcctctttactgggcgacgttgatcctcgcacttccggtcctatcccgttcacccattcagctggtgagtttgatccgaggtctcgcagctatgtctcagcagagtcgcagagggttccttgaattggactcagatcgcctctttgtttgcgcatgggttatcatgcggtcttttccccggtgctaattatctatatagtgcgcttttcacagacaaaatgtatcctcaaccaggtgctccaattccgatggcaccacctcaaaagcccgaaacttttatgctctccaccgaagcacagcgaagcctaccccatgacgcgcaagttgctcttcagcaagtggataatcgtatgtctttgggttatctttatcccccgcatcaaagcaatgtattgacatggggccagtgaaatatttccttctgtctgctcccgttgactggcaaccggatcaactcattcgacgcttcttgcttcctacgggcgactatgtctcttgtgtttactggttcgtctcactcttgagcgtgatggtttgggaagccgactaacccggtctcaataggagcggcctcttccacatctccggtaccgatattgttcgatgtctcgcatttcgattccaagccttcggacgtccggtgaagaactcgaaaaagtttgaggagggcattttctcagacctgcgaaatctcaaggccggcgtagacgcggtgctggaggatccaaagagcccattcctggacttcttgtacaagaacaattgtattcggacccagaagaagcaaaaggtgttttactggtacggcgtacctcacgaccggctcttccttgatgcactggaacgggacttgaagcgcgagaaaatgaatcaggaggccaccacggtcgcagtcagcgaaccggccatgtccttcgaattcgactcgtctcagtctctgtatgagcaattgaccaagtcacaacaagtgaatatgaactcgttcgctgcccacgcaagtacgacatatggccagcccaactcccccgtgcttcggaccgttgacgcaatgcctcctccgcagatggctcccccagcgatccctctgatgcaagacgactctgggaatcagatgtacagccaccaacagatgcccctttcgaacaatctagtccagagcatcattaagcgcgagcaggactatggccccatccagtacgatcgccacggaatgcccattccccgccctcatcagcgccactcttccatgccgaccttctacgagtactcccctgcgccatcctttgtatcttcacaatatgaggattacagcaatcgcggcctgtcctttgaaccagtcaccccgccacagcattcggtcggacttggatcggaaccggcttacatcgccaacgaagataccggactgtacacagcgattccagatatttcaagcgggcctgcctatcaccatatgatgcagctgcctccttcgaacctgtctagtgctcactatcagcctgtgccccggtcctattcggcaaacccgtatcccgtcatcgagggatccccaacatacaagcagcgcagacgtcggtcatctatcccgccgaacagcggtgctgcgacacccagtggcgcagctcatgtccaatcaacgaccccgggagtccaggcggtctcgtacgctgctcacagacctagtgatctgcggcgttcggtttctagctcagtcgctccagtcacggagggggatgaagccactcaggaactcgctcgcaattacccgagtgcgctgctgccacaaaaggatctttatcacgaaatgtcccgtcatagcacgccgctgcaaagcctggatcaaagcactgcacatcattcaggctcaatggcaaaccaacccaatgatctgacatctctcccaagcagtggtaccatcgagactgcggttcaaaatcataatgctcggtcagagcgttcagcgcctggtcctactcggagagccaggagtgcaaccatgatggagttgggaccgtatccaaccaaggcccactcttgccctatcccgtcatgtggtagaaccttcaagagattagagcacctcaaaaggtaagcttacttctattttgtcactcaccctggtggcgcaggtttcaccgagcgccggtgagttcgtttcaattgccgccgactaacccgtttttctagacacgtgagaactcatacacaagagcgtccgtacccctgcccttactgcagcaaagctttctcgaggtcggataatcttgcgcagtaagttattattgtcttatttattatacgacttttgctaatattcagtagacatcgtcggatccatgaagcgcagcaggatggtcagacaatctctcagaccgaggaagatctggagaacgatacacatgaattcggttcccccagggaagacatgtccccacagcccgctcacacaatgattagtatgcccaacatgacgtcgatggcagctcctttgagcatgccgtccgccctaaccggtatgccttcacacatgatcgctccgcaacttctccaacaacacatgtgagaataccatagagcacgatgtgtctgctgcaaaacagtagatgcaacatctcatgtaatcatcacggggatttgtctcaactttcctttctctttggagtcttcaaggcgcatacaggcgtcctttttgggttcggggcttattagcgcctcttgtttaatcgcacatggtctcatgctggccttgtacataccgcgatattattgtatagcccgtgtgttatgtctttgcttgtctttgacacagtctttcttttcctttggttttgttgggtttattttgggttttcgaactgtgcaatggtcacaggaaacgccgtgtattattggtgccgactgccctgcacgtgaattgggttgcgctggcagacattcatttcacgcctggcgggcacgggcacgagcgaggttcgactatctctcaatgggaaatgggttggaaaggaaaggatttgggtttgcttcttcttggatcgtcaggcattgtccacgaagagcggctgagaacggtaaggttattttgcacgcctcaaatcacactatatagacagagacattgtgtaacgacttgaattggaaacagaaaaacacttgaaaatcttcaactaccaatattttcttgctagtaaatgtccacggtggcaatgatgtgatcaagggctggtatggtcctgaggtagtaggtcacgtgccgctgacgtcgccctcgaggaatgggatctcagcagatcgcccgctgacacaccgcgctttgatcaacagggctataccctgtcgccttttagcttctctcagctactaatctgactgctggcagtaaatgatgcgtggttgccaacacccagcatagccccatctttcctttccgacgatatctacttccccacactccaacaatccacggtccacactaccacgaacacgaggattgtaaattagtgaaggaaatctccggtctcagcaactaccatcgaaaaggcatatctcagcttacttgagccccgagtcacagcacagtcagctgctggaaatcacagcaggcccaatcatatccaaacacaaatcacctagtttcatgagtcaatcctttcaacgcatcgaaagccggattccttaattttcccatgggagccttgaatttcaagcctgcccctggttatattgacgagagctcgcctctcatggttgctactcgctctgcggagaggcgtggtgtgcgcccttttgccggtgccgatgagtcgtctaagaatgcgctgtacatgttccttttgactctttctattggtgggtgagtagttttgtatggggtgatttgacttgtggtcatttattgatattgggtttctttgacagacttcagattgtttggtctgtcgaactttctaatggatcggtaagtataagtcgcgacttacaggagatgatttgaccccaactttgcaccttacccctttcatttccgaagctgtaagactgaataaaagaacatgctgacgggttacagccattccttctatcccttgggatgagcaagtcgcttcttgcctttgtttggatagccagtcccttgacgggcgcactggtgcaaccatacatcggtattcgaagcgacaactgccgactcgcgtggggtaagaggaaaccatttatggtcattggaggtgcagcaactgtcgtttcattgctagctctggcatgggtgaaagagattgtgggaggtgttctgtctatattcggggttgaaacatcagcgattaagattgttatcattatcatggcaacaattttcatgtgttgccttgattttgccattaacaccggtgcgcattccatcttcacttttttaatggttacttggctaatcttcgtcctatagtgcaagctgcagccagagcatttattgtcgacaactgccctacccaccagcaggagctgtccaacgcctgggccagtcgtatggtcggcgttggtaatatcttagggtatatctttggctatatggacctgccaaaggttgtccctttcttgggaaatacccagttcaaggtcctgtgcgtacttgcctcggtctttctgagcacaactgttgccattagttgcatctatatccaagagcgggatccccgagaagacgggcccgtgactgacaagcttggcttggtctcctttttcaaacaggtcatcaagtccattcggagcttgccaacgcagatttcccgcgtctgtgaggtgcagatcgcagcgtgggtgggctggttcccgttcctgtactactccacgacctatatcgggcagctgtacgtcaatccaatattcgcggataatccccatctctccgagggtgaggttgataaggcctgggaagatgctactcgcgtcgggacattggccctccttatctatgctatcatctcttttctttccaatatgttgcttcctctcttcgtggtccccttgtatggaccggcgccagagactgtttcgcaacgggattccctagacggtgatttagatggtgattcagagccagctgcaaggagactatctttttcaagcatcccgacaggcaatgcatccgagcctctgcttgacgttccagtcggacaagagaccgaagagaaacccacttggctttctcgcctgcgcatcccaggcttgacgctcccgagggtctggctcctctcccatctcctcttcgcggcgtgcatgttcagcactttcttcatctactctcatcaagccgggtcggcatttgtgggccttgtcggtgtctcatgggctgtagcattgtgggctcctttcgctcttatctcggcggaggtagctaggattgatccttctagacgaaatcgtcgccgagcggctcagactacttataccgagcatgcagatgaggcccaggatgagggtcccggtgaacttgacagcgtcggtggcagtgatattgagaatggacacccgaaagattatcgtgataatggggatgttgcacaggcgggtatcattcttggactgcataatatggctgtttctctcccccagattctgtctagtcttgtttgcagtgctatcttcaaggcatcccagaagcaaagaggggagccgtgggatgatagcgtgggctgggtgctacggtttggtggatgtgctgcgttggtggctgcatggttgactagaagggtttcggatggatcaagatagacatgatatgtagattgtacaatgcatttatcagttcttgtacatgttccgatgttgtatatattcagttttaggcaacgtataacaaacataaagattctgcagggaatagcgatcgtcgtgcaaagcatgtgggtcctacattcagccctagagtcaatcaaattatatcgcataacgatgatgtgttgcaccgaatcggccaaccctttgttcctgtttatttggccgaatcccgagaatcggcccacgtgtaattttaaatacacgatacgcaaaaaaccttacgctatcaccgtattgttccagtttcaccactaatttgggtctagccagccctgccgtattctgtattgtacaacccgtacctgacctcatatctgtccctctgatgcaacttaaacagtccgtgtcctattgctccgtactgctaacccaattcgaccttgtcgcaaccttccgctatccattcctttgtggattatgtgcgcctggtcctgccatcttgatatcattgtgggagtgaattgccagtccttcgctctggcctttgatacttcccaaggcgtgagccgcgatggctagccaatttatgaacgatggcctacacgccctgcttcgtatgtctctctgatcgatggctctgaacgttgcgcttcgatttttcatttggactgggagctaacatgtctatttctgttgtagggagggcctctgaagactccgaccccgatggtacgcgtgcctgaaccccctcatcgctcccctctcgtcttgtcgcgatatagcgctattcagcctcggaaatttgactaatatggactgcagactcccccgaggcagggtccaaggagatcacgagctcctgggcattgtttatcatgatcctgttgttgatgttcgccctcttcacgagctatatccttcagcagaggaagatccaagctgtccatgagacggttctatcaatttttgcaggtaggcaatatcctcgagtggtgcaggcgcgatctgaaaatatacaatatacaaagattcatctgcgcaaattggtacggacttgctaacggtcgctagggatgttcgttggactactcatccgtttcacagactccaccctccaagacagcgtcgccttcgactatcaattcttcttcaacctcctgcttcctccgattattctcgcctctggttatgagctccaccaggcaaactttttccgacatatcggcacgatccttacgttcgcgttcgccggtacctttatatccgcaatcgtgctcggtctggtgctatacctatggacacggatcccgctgagtgggctgaatatctcctttgtcgaagctatttcggtcggcgcaactctctccgctacggatccggtcaccatcttggctattttcaacctctataaagtcgagccgaagctctacactattatttttggcgagtcgattctgaacgatgccattgctatcgtgctcttcgagacggcacagaggtatcatgataccggcgcggctggctctttgacgttcttgaatctatttgaggccgtgggactctttttgctcgtgttctttggtagcatggttgttggaatgctggttggaatcgctaccgcgctgggtctcaaatacaccctcgtgcggcgcttgcccaagattgagagctgcttgatcattttggttgcatacgccagctacttcttctccaatggcgtgcatctatccggcattgtctcgctcttgttctgtggtatcaccctcaagcattacgcctactataacatgtcgcgtcgcacgcagttgaccaccaaatacctgttccaggtcatggctcaactctcagagaacttcatctttatttacctcggcctcgatctcttcgtggagcctaacctccagttcaaccccttgttcatcatggtggcagtgtttggtatctgtctctcccgatacctcgcggtgttcccactttccaaggctatcaattggttcattcggtatcgagcacgccgccgtggcgtggaggtccccgacgagttgccgttcgcttatcaagcgatgctcttctgggctggattgcgtggtgccgtcggtgttgctctagcagctggtctatcgggagtcaacgcgcccgcacttcgtgcgacagtacttgttgtcgtagtgctaaccgtgatcatcttcggcggaaccacagcacgcatgctggagattctcggcatccgaacgggtgtggtcgaagagcttgactcggacgatgaattcgacaccgaggtgacccatggcggaacctactataagcgctccggcacgagcctaggatacatcccgcgacgcaccgactcggtgatccccttggatggggtcacggccaacccacgcgctggacccggggagcgaacacacagctactccaccggaaacagtcgccgcccaagcccaccatatacccacacaagaatgtactctgccgcgtacagcaacaaagatcaatcctggcgcgaccgccaatctaccgcgacgttactcaacggcgcagctggaccgagtgctggggaaggcagcgacgacgagttcggcctgccaccttcaggcgccagtcgttccaacgatcacactcaccctgatgagttcgatcttgaaatcgagggcatctctgacgatgacctcccgccggctgcaaacggagcctcacgtctccgcagatccgcctcccagccccctcagccttcgaccgtcttacccaccagtgccgcggcatcgaccagcgtctcgcccagtcaccagccagcgggtatgtccgcacgggatgcgatgcgggggctgttttcgggtggtgcttcgggcgaccatgcggcttggttccgccagctcgatgaggactatatcaaacccacccttttactagaccagtcgaatcataagggccctgggcctggtgcggtttgagatgatgatacgttggaagtgacttccattttgttttgtttgctgtgggtgtatatttagccttgggtctgcattgtcgatgttctgcttttctgcattttggcttccatccaaagcctgattgcttgtatgaggttgcgtaaacgaaccccggtctaaacttatagaagtcaacaagatcttcaagtgggaactacaagtaccctctgtaaagtaacagtcatagcattggttttccaaggttctccgcactttgatgttgcccgttaccccacactcgggatatctcacctgtaaagggaagatggtcaaaacacccgactgagacaatccaaaaagcgtaagacgaaggaacaatccctctgtctccgtcgatggcgatttaataaacgtaacaccctgcgataagcaaaagcttcgccctgggtaggtacagccgtgcgttcctatctcttccagccttatcgcccactcggatgagcgacagctatctgcgctggatggcgtaggtccgacatacggcaccatgcttgtttcgggcacacttacgcccgtgcctatcttcttgtcatctgatccctatattagcttctgaggcttgcggttgtgctggtatgttttcgaaccggtttgcgccgcttttagaagggggctttataggagtagatgtcagcacggcttagtcttggtgatctgctaaggagtataggtaattacgatgctgtatggagtaactacatatacgtacctgggttgggtactaggcagtcacaagaattgaagcagaacagggcaatatgaggcccgcagatattgaggtgctaccttgcatatccttactatagggacatacattatgatcagtatacgacttgaatatgttggagtacgcagtagtaaagctgcctatcaagggcttttgaaaattcatgatcacctaggcaacctgtcaaacaacctacaatactctcagtggcgtactgggttctactcagcgatcaaaaggcagcaagggatgaaccctaagggagaaaacggaacgtttcaagatcacatacaagcttgtatttatgctttcgcgctccgctagtccagccgcctctaacctaagttggctcgaatatagaagtgatatgcaaaatggtgtcatgtacccctcaccgtgcagtacagatagatcgatctagttatcttgtagtattctagaattggaaggtattcaacggttatgtctatcgagaccgtggtcggatggcaaggatctgcgcttagaccttatcgagtcttgagtcggtgcttatagtacttgtgtccatcggaatattttgagacctaaacctcctatttttctttttgtcccgagggctctatttccatcgaatcttaggtgttcctcttcgatcgcgtgggcttttgtttgcctacccacgacttcatttcctctataaccattcctaccctagccatggatgatacaatggagaaagtgttatcccataaggtcaagaggcgtcagtcgacggctacaggtcatgactcgatgccccaggctggagataccgagttgctaggtgtgtataatccccggcttattggaaattggtgttacgatatgagatcttgtcactgacggatcaaacagcaacactcgggtacaagcaggaattgcggcgtcattattcgacgattgagatttttgctgtcgcttttagtattatggggcttttgccttccattgcatcttcgttggcgttttcaatgcccgctgggcctgtgggaatggtttgggtaatatactcctcagcctgaaattggttcgcattgtgactgacataatggatagggtatgcatctattctttcaggagtatcgtctggcaattgctaacagactccttggttaggatggttcgttgcgagttgcttcatcttccttgtggccttggcaatggtatgatttactccttatataaccctaaaaaccacagaactaataaccaccaggccgacatggcatccgcaatgcccaccgcaggcggactctatttctggacacactactactcatccgagaaatggaagaacccgctcagtttcctcgtcggatacagcaataccatcggcctgatcggaggcgtatgctcgatcgactgtgagtcagatgcaatctcaaacaaaaagcccataattaacacatcctcatcagacggtttcgccaacatgctcctctcagtgatctctctagcccgcgacggcgaatggtccgccacacgaccagtcatatacggcacatacgcagcaaccgtcgtcgcacacggcttcatcgctatcttctttgcccggatcatgccgaggatccaatccgcctgtatcttcctcaacatcgctctcgtggtggctaccgtcatcgccctgcccataggcaaagcgaagaatagcccgcctgtcaacccgggcacgtatgtctttggggaggtacagaatttcactacttggcctgctggatgggcgttcatgctggcgtggctctcgcctatctggactattggtgcgttcgattcctgcgtgcatatgagtgaggaggcgacgcatgctgctcgcgccgtgccgctgggaattatctcttctgctggactatgtggtattcttgggttcgtttcgctggcggttattgcggcgtcgatggatacggatatcgaggggattctgaattcgaagtatggacagcctatgactcaggtatgttttcgtcttctttcttttatggggtcgtactttctaatctgggttctttatagatctactacgacgcccttggcaaaagcggtgcccttggcttcatggtcgtggtaatgattgttcaattcttcatgggactgagtattgtgagttcccgtcttaccatctactcgaaatcccagaacccattcactaatccacccacccaggtcctagccgcctcccgccaaagctgggccttctcccgcgacggcgccctccccctatcctccttcttccgcaaagtaagccaacgcaagttcacacgctaccagccagtccgcatggtctgcggcatagtactcgcatcgataatcatcggcctcctctgcctaatcgacgaagcagccgccaacgccctcttctcgctcgccgtagccggcaacgacctcgcctggctaacgcccatcctggcgcgtctgctctggggcggcgagcgcttcgtccctggtgagttctatacaggcgcttatctcagtaagcccatcgggtgggttgccgtcatctacatgatgtacgttattgttcttactatgattcctaccgaggggccgaatccgtcgcgtgagttctattactattcccggtgcttttgcttttgctgacagtctgtttgaagctcaaaatatgaattatacggttgttatcaatgggagtctttggcttggggcgttgctttattattatcttcatgcgaggaagacgtataagggaccgcagactactgttagtcccgaggatgagggcaaggctttggagcaggactcgaaatagttgctaagatatagatagacgtttgggtgggacttcggcccgataatgctcggtgaggctttgttaactattcctatagatcaagttcatgtactcaatactacaagtttactctatccccattggttggggagacaccggggatttcagttccaaattcagatcagatttggccttcaatatcgctaaaatcaccctttcaacagggctaataattgtcgctagacattaattctcgttcttctttattttttcgtttcttcatcatttcttcgtcgttcttcgtcgttcttcatcgttcttcgtcgttcttcgtcgttcttcgtcattccttcgtcgtttcgcaaaagcaattacccttctgagtctcattccagactcaacgcatagatgaggatgcatctattcaggaatctcgaggacgtagcggccaacgatcttgttttcctctggataacatagattagcatatggcatatcaagtaatcgaaacatccaaacttacccatgagcttgaacacctcaggcagttctttcaggggaacaaccttgaaaggagccttgatcaagccacgctcgtagaattcaatggcctcgacgccatcctggcggttaccgacgtagctacccttaatggtaaccatcttgacaacggtttcgaaaacaggggccttgaggaacgcatgggcgggaaggccaatggcaacaatagtaccacgagcgcgaacgtactcgacagcctgctggaaaggcttctcggagacagcgagcaagagcacagcgtgggcacctaggccaccgggagtagcagccttgacatctgcaatgacatcggtagacttggtgaaatcgatgtaggtctgcacaatatattagcatgatcccaaaaagttgtccggaatagaaaagcgtacctctgcgccaagctccttgcacatcttctccttctcctcgccaccgtcaatagcaagaacgcgcaagcccatagccttagcatactgctgcgcaagcgaaccaaggccaccaccagcaccaacaatagcaaccgtctgaccggggcgcgcaccggactccttgagacccttgtagacagtaataccagcacagagaataggcgcaatagcatcaagcggcacatccttgggcagcttcgaaacgtgcgctgctttaccaatcgcgtactgctggaatgtaccatcaacggtgtatccagacagctgggcatggggacacaaaggctcgtcggaggattcgcagaactcgcatgcgagacaggagccgttgagccatttgatgcctgcgtggtcgccgatttcaatgtcctgcacgagagagccctttgcgacaacaacgccggcgccttcgtggccgccgactaggtgatccttcacggtgaggggccagtcgccgttcatggcgtggagatcggtgtgacacacgccggtgtatcgcatcttcacgaggacttcatctgcgcccggctttgcgacggggatttgcttgtacacgggtcgttcgcctttatgttcgatgatttgcgcccattgggtctcggggatggtcattttggtcattttggtgggggtagaatacttggttaaatgatggaatatgtgtgaaggtaggaagaattgtctggaaagtgtttgagtgagagataatggtaacacaggaaaatacatgtcggcgcaggtgttttatagcaagcgcattgcctgatcagggcatcggctgctttaactccgtgagctcttcgaatccatccggttctctggtagattcggcgtatctctgtcattctcacacaatagcctcggaataccgtggaatagctacataatcggctttgtatccacttcggctcccgtttgcggtatacagtactccgtctacagcgcatggttattgtccgaacatctagaccttgacgacttcgtaactgtccatctctatcgccaccacatacccaataggtgtccggtgagatcgaagcatcactccatgtcagcttgtatgcatccatgaaacgggaacctgcccatcgaatcccatttggaggaaagacgaaccgcaattggatacagatacacatatgggaagaccgacgatcacaactatgacagaacatgtccagacattgtgccattccaaggttgtgctgtccacgtccatatggggagtggaggacgtcatctcgaacatcaggccatgcggcacgcggggtatggccggagatttagagatttcaagctgttcatggcgaggctataaatatcactgagatttgaatcagtatatataagtgtctcgaccttaatagaaatatggtttatattcatcccagtttccctcttccgggaaatgtcgatctgagattggtggttgacctgaggctatacatatcctttgactctttagcttggctattataaggttggttcttagtatatgcattatatgcatatacagatctattataatctattatagatctattgatgacatatgaaatactttatatccaacgtggtaggtttgagttataacttataagctggtagctctggagatgtctatgacccagacctcttatataccgacgaatccctatttagtaattctctgatgtataactagtcataggctaaacaagataaccagattgatcttcaatccaagctctaaaacataaaaacaaagaccgaccgactataatcccattgaatccaatagaactggtctccacagggaggtggatagggcgatctcacgataaactcggatcagcgaaacagatttcacgtcaaatgcgagtggaagcgaggactcgctaattatctgaactcctgcacttaggactagggatattcaacacttgaacgcattggaacaagacattccatgttgatgatgttcgtcctcaccacctctgtgctccacggggtgtttgtatggactctgagcgagatcggggcacaacctgggaattctcgaccagctagaaaagaaaaacgatagagaagaacacgaaaccattgaaaatagtcgtctaaaacacagaaatcaccgctttccactgtaaaaagcccgttcggatctaacccccgggatgccggagttggtgaaataccccagacgaggaagagattcacgagaaatgccaaatctcgtcaactttttccccttttacccttacgagtcgtcgtcttcccctctttcacccgacttcatctttcgtcctcagttattcctccattcccccattcaccccatctctcccttctcatcctcaaccaccgcccctgcatcagctcgcctaggcccgcgcattctctttcttgggctccacggaaacttcccttcttcctgcatcttcccaccacaaacgaatccatccctccatcaggtatttatggctcgctttcttcctccatctcttctctttcatccctcttcactccgaaacagatcctacctgaaaccaacaactgacaccgcgtcactagaacgccggaacccccttgacaggtgtctctgagcaggggtcttggactcttcttcctcaattcccgccccgaccctatctcgacccgagtgaccaacctttgacgcgctcgacccgtaaccggggaccgcggccatcatgacgggccctccgccatacaacgcccagtccccgactcagcagcagcggtatccggcttacacctctccgaataagaaccacccgtattacccaagcaatgaaccaccgcaaccgccgcagcagtaccaccagcatcctccgcagaccccacccgcatttggtccatcctccgtcgcgcgaagcccgcacttttcgcacgcgtccccaatgccgtctacattgccgccgcccttgaacgggagtgcgccacatcacccgtcgcacctggagtcttcgcaataccagggacattcggcaccgggttctcagctcccacttccgcgcccttattctagctccgtgatggcgggcaacggtgcttcgccgtatggatctgcgacaccacatggacatccgcccagccacccagaaggccattcgcaatctcccaccagggagtccgaatccccatatcggatgcgaggtaatggtatcggatatggacctccgatgatgcgagagccgagaccggcctcaccgcaggaagccgtacgcattacccggacccttgcaatatctgctggtttactaactcatccctgcctcgcagaaacccgctcgagccgcagaccccatgtcgttcgccagtattctttctggcccgtcggacgatcagcctgcgagaaagccatcgcctctcccggtccccatgatctcctcccacacgccgcatgctccccctgtctttatacaccggcacctggaacacactacacctgtagctattcatcacaaacacgagcaccgattagactttgatagacacatcgatggcccgagaccaccacatgcgaccaatgggttcgtcaagcccgatgcggaatacgctgcacccattcctcgtgcaccgctccgaaaaccattccctcccggtgtggatctggagcaggtcaatcgggcttcagccgagatcgatcacgccgagaagagcgacgttgaagatcctggcttcgacgcagaacaagagcggtatcgggagaaaggctacaaacggtcgttggaaagcagccgcgcagaggaagtgcgacgaaaggtaggtcgtctgaaagtcgttccatgtccagtcaatcccatactaacatatgctcagcgtcgccgcaacgagttcctcatcgatctaggtagatccttcgaaagacaggccattcttggcaccgaaagattccgagtgctcaacgagggtgctgtcatggctgaagttcaacagaaggagatccaggatgaaaaagaacggaagaaggacatgcagcgcaagcgccgtcgtgaaaacactgtgcgccaagagatgcagaagaagctggaggctgagcgcaaggcaagcaaggcccaggaacccggagaaagggccaagttcctgcgcgaagccgagcgggcacagaagaaaatccgcaccaccaagcgcgctctcgaaggcggcgatggccaggatgagctcggtgaagtcaccccgcttgctcccaatctcgaaggcgggacgaccagtcaattccacatcggccgttcctcgcccagccgacgcaggtcgggccgcgccggtcctgtcactcgtcccaagaagtccaaggagcagaagcaggccgagaaggatcttgccgaggcagcttggaatgctgggttggacgacgagttgtatctcaccccaagtgcgagaaaggatgttcgacgctcaaaggagggtactcccatctcgcagctacactacgacagtaaaggctataaccagatctacgagcagatctggcgcgatatcgcacgcaaggatattccaaaggtctaccgcatcaaaacctcctccctctccacccgccaggagaatttgcgcaagacggctcagctggccagcaagcagtctcgcaagtggcaggagcgcacgaacaagagcaccaaggatactcaagctcgtgccaagcggacgatgcgtgaaatgatgtctttctggaaacgcaacgagcgcgaggaacgcgacttgcgccgtgtggctgagaagcaggagcttgaatcagccaagaaagcggaggccgaccgcgaagcaaaccgacagaagcgcaagctcaatttccttatctcgcaaacagaactgtactcacactttatcgggcgcaagatcaagaccgacgaagctcaaggggacagcgttgttactgccaccggagagaccatccaaccgggcaagccaaatgctcacacaatcaatcttccagacagtgtggccaaccctaacgccaagaccactgcattcgaggaccttgacttcgatgctgaagatgaaaccgtgcttcaacaagctgccatggctaatgcgcaaaacgctgtgcaggaagcccaggaccgtgcccgcgccttcaacaaccaaggagagggcgacaatatggctgcatttgacgacggcgagatgaacttccagaacccgactagtctgggtgacattgagatctcacagccgaccatgttgaatgctcagctcaaagagtaccagcttaagggtcttaactggcttgtcaacttgtacgagcagggtatcaacggtatcctggcagacgagatgggtctcggtaaaaccatccagtcgatttctgttatggcttacttggctgaggtgcataacatctggggtcctttcctggtcatcgcgccagcatccacactacacaactggcagcaggagattacaaggttcgtcccgaacatcaaggtgcttccctactggggtaatgccaaggaccgcaagatcctgcgaaagttctgggatcgcaagcacatcacgtataaccgtgactcggaattccatgtcctagtcacctcttaccagcttgtcgttcttgacgcgcagtacttccagaaggtgaagtggcagtacatgattcttgatgaagctcaagctatcaagtcctcttcgagttcgcgatggaagaatctgcttgggttcagctgccgcaatcgtcttctgttgaccggtacgccaattcaaaataacatgcaagaactgtgggccctgcttcacttcattatgccaactctgttcgactcccacgacgagttcagcgagtggttctctaaagacatcgagtcgcacgcccagagtaacaccaagctcaatgaggaccaactcaagcgtcttcacatgatcttgaaacctttcatgttgcgtcgtgtcaagaagaatgtccagcaagaactcggagacaaggttgagaaggacatcttctgcgacttgacataccgccaacgtgccttgtattccaatctgcggaaccgtgtcagcatcatcgacctcattgaaaaggctgccacaggcgacgacactgatagtagcacgctgatgaacttggttatgcaattccgcaaagtctgcaaccaccccgatctcttcgaacgtgccgaaacaaaatctcccttctccgctgcatctttcgcggaaactgcatccttcgttcgtgaaggaaactttgtcgatgttcgctattcgactcaaaatttgatcgaatacccgttgccacgcctattgtgcagctctacaggacgacttgatcttcctggttctgataatccccgtgtgggcttccaaaccaagtacctatcccagctgatgaacgtctggacaccagaaaacatccagaagagcgcacgtgacaatggtgcattctccttcttgcgtttcatcgacacttctgcaggggaagcaagtgagatggcacgacttggcgtctacgaacgagcagagcgtcgtcgcagcaagccaaacaggctttctgccttgaatgtcatctatgatgagagtgacgatccaaagaactcggtcctatcccattcgatgttgaatattgttgatcgtaatgatcaacaggctgtgcgagatgtcgccattgagggccgaatgaaggatctcatgactgtttcacgctcctcattcgaagatcaaggccttcaacttattgagccttgttctagtcccaaagcctcggcgcctcccatcaccatgtcctcttccggccaacagacaacacgggaaacttaccaagctttgttcaatccctccgttcgacaagcactgtctggacactgcagcaggcaacttgaggagcagatcctcatcaagaaactcgatcctacaccttactctcacgctcctatgctgccgccaccggtttcactcaagggccgctacagccacatcgaggtaccatcgatgcgtcgtttcgtgacggattcaggcaaactggccaaattggatcagctgctgcgggagctcaagcccggtggtcaccgcgtgctcctgtacttccagatgacacgtatgatcgatcttatggaagagtacttgacataccggaacttcaagtactgccgactagatggaagtaccaagctggaagaccgccgcgacacagtcgcagacttccagtccaacccggatatcttcgtcttcttgctgtcaacccgtgccggtggtcttggtatcaacttgactgcagccgacactgtcatcttctacgactccgattggaaccctaccatcgattcccaggccatggatcgcgcccatcgtttgggccaaactcgccaggtcactgtctatcgtcttatcacccgcggcaccatcgaagaacgcatccgcaagcgtgccttgcagaaagaagaggtgcaacgtgtcgtcattactggcggtgcttctggcggtgtcgacttcaacacccgtgctcgcgagaaccgcaccaaggacattgccctgtggctcgccgacgacgacgaggccgaactcatcgagcaaaaggagaaggaagccatcgaacgcggtgagaccctcggcgccaagggcggaaagaaggccgctcagaaacgcaagcgggatcttacgctggatgacatgtatcatgaaggtgagaacactcgaccactccttgttatgttttaacgtccatactaatcgattacataggcgagggtaactttgacgacgccagcgccaaaccctcaggggcggctacgcccgccgaggaacctgtcgaggtaccttcagcaacgcctgcaaaacgcgggcgcggccgtggccccggcaaaggcacgtcgaaacgagctaagaccacgaaagagcgtcttcgtctgattgacggcgacggcggccttgattaatccaatgactgtcaaataatgcaactcggggcggcgttcaaggtcacagctacttctcttattattttcttttgtcgattggtcaatccaattcctccttatcttctactttccctctttcccagttcttcttatgttctcaaatggcagatacatgaactgctctgtattatcatacgaaccttgactatgttctgaaacagcgacgtgggctcagtatggacatttcccaaacaaagtctagtggctgagggtggttgatgcaatgatgaaaagatgattttctttccccctacgatagactcgatcctggcttttgctttggcttgtggctcatgggtggttgtggcggtctctgtgaacttggtgtgatttgttctttctttttcccccattctacattcttccccttttttccccttctttttctattttggctttcctgactcgcttgtatgttcaatgttcaaaaagggcgcgagtgttttagtttggttatgagtgtcaatgtattggtttgatggactcctatgcccttggtcttggtttgttcttgaaagaaattgtaggattaggtcttgtagtgaggtgtgcttctaggtcaagaatggtgatggttgatggtaaagttgtatacttagcttgccagccttgctcgtcattcagctctttgagcttataatgtcccagatactaggaagctatcatctatgtacatatggtgggcttgagcgaggattgtaccggtagccctcctcttgctgatatcagaagaaacaaacatgatgcctcacaccaaagcgaatgccagttctcaaacaagtcagccggaaataagagacgccgttcctgcccctgccctcatcatcacgttaccatctaattaagcgagcccacgtcgttgtttgtctcatttgtgaatagtggcataaaccgaccgcccttaagatacctataagaaggcagccctgcccccagaccttcctcttcttttcttccttcttcagctcctctttgccttctggcttagatcttgtgtagtatctgttcttgtcagcttaatctctgatagtcctgcattgcgggtcattcatgattattctaatctttggacctcgcgacttggtctctgtgcttgcgcatgcctcgttgcactgtgtcattgggcttacactacccccgattgatgcgaacttccttttttcatcaattgttcggcttggctgggcgtttggagaagatggctgtttgggttttatgttcttgtcgggtgggtccgttgtttacattgttgattaacagaggtcaagaatactgttgtttgaagttcctattacatgtgtctatcaacttggtccttgttgtaacttactctcatctcagaactggaggtggggagaagatagctttgtcttggggtcgagatacgatagctctctggtccctctctcttctcgtctccgttccttttcattcctagaatgagtacattgtttctctaactgaactacagctactgactatctggtaaacacgatcttgacacaatggaacttccacccttctctcggggtcaaacccgtctttcattaatctgtggcctccgagggacaagtgatgatgctgagatgaaattacgatgaacttatccacaaggagcataccagttctctactgggtgatggaaatattatcccaatgatggtaagcatactatcttctgccttctgttgctaataacttctggcagaacacaaagcaaacgcgatttcttctttcctccccgtcacgctccatcgccccaatattcctccggcagaacatccatctgcccccatcaactgtcccgccgggatactggggtgagtatgagaagacatagttggtatccttccaccgacggggatttctcgcatcgctgaacgaaatcggaatcaaaaatacattgtcataccataatcagacagacgatgaggggtgttgcccaagaaagaagaggcacaccaatgctcgctctcggctttgcctgttcgttttgggtgccaggaggaaaggaagagggaggggacaagctatctacttctagctaccgtgtgggatctgacagaccgaaatctgccatgtctctcgcggggagatccctcctgcgcaattgactatgctcctctggagttatcgagctgcaggagatacctcttccttcagaaagtgagatgaactactacaatgtaggaaaggaatccacgagagattgatgacatttgtaaaactaggataacgatctctcctcccaggatctgtccccactttgtagcagtaagcttagtggggggaagatagatgatgtattatgacctccttggtgaggttaactatgaagctatgactaagctaagcttgtgacactgggttcttttctaatcgtgtaaccaacacattccaacatcgaatgttccgcttggccactgtgcctgtcttcctgctttttcttctggtgggggacaagtttttggttggctgcatcttagtgtaggtccgggagagggaaatagctgacacagcaagaggttcccttgtcgtggtctaggcagtgggttagttcctcataggaagagataacattttgaaggtggaggctagcttacggaaccaggcacttttccgtgtctgctcagccaatcttggaagaacaaaggggggctgcactcatctctttctcacacaagatcctccacaagatcctcgagctagatggggttctcattcagccatatcagcaaaccccaccgagtatggtgcgacgattcgaggtaaatctccctcaactccgccgcaaattcgtccagctctatagcacgggcgcggtcgtggcgagctgggaaatagctccaaccacacacacaccaacggtatagtggggatattatttcgacagcatttatgtactgccatgaaatcctcaagacagagaaatcttggaggccttttgtgacattcgagggtgactgccaccaaccaagaaccatgtattcctgcctcaaacaattcggcaaatgttgagatgcggaacttctcatgaaattcggggtttcgtggtatagagattggagcggtgctgtgagaggaatcttttcactgctgaacaccatgcatatagtcgttcaggtcgcttgggtattgtgtgatggtgactgcgacaagaacggtaaatggctttctgtgctgtatccgagtgcatttgcaaaaggccttcattttctttatttgagcctctgtgactgccaacatttcttctgtagctctggctaaacgagcaccgatggacaattcggtatcgtggaatgccccgaagctgcgcagatgagaagacatgattgttgttgagaaacaacccaggaacaaggagatggaggaaggggatgcgtgccaattggttctgatgtctccattgattacttccgtataatctttgatcactcgggaaatttctctcaataccaatcggcttcagaaaccttgcacttgggggtataggttgcgatccgggtcattgacgacttcgagagtattatcgctatcattgaagctccatggtatcggactgcggtacgctttcgccactggcagttggaagatgaccgtgtgtggtcataaatatatatataacttatagcgctaggaatatttgcaactaaagttctaaatttggcgccttggtaaaagttagtcctgttcacaatgagtacttcaagataactgatctggaagtgagacaaaagcgaatggaatctccatctgagcgagagatactttcttacctatgcgtcatctcgcttcttcaggggtgatagcatcatccttctttcgtctctcattcccctattctctgggatcgggaaagggacatcatgtcttggcagttcatcaccattagcaatctctggcattttgagtcacgatatgataaggtaagagggagcgagacagaaaggctatgatgaaatataaataggtcgagcttcttcaggtgttgccgggatgaagaagatggtctatgggcgtttataggcataacttataagcaaataaggcaataacaaacaaaatagaagtaaacacaggtctgagaaaggagacaatcggatgtccatttcttttctttttttccttcctcttctctgctctctttcatttcgaccgtccgctccgcactactacagtcccagccagcactccattggccaagaaatggatgcccccaacgaggaacattcgcgaccattctgaggttacgaaccggacatctccacagagtgcgatgagatcaactcgcttgaaggctgcagcaaccaccagaaagcccgagagccacctggatacaccgtacatacaccgtacgcccgtgagatcttgcggatgcacaaggaagtggtcgcagcccgagaagagtacaacataaagtacgcttctctagaaaccagaatggaagttcgctgcatcaggtgaccttgggcccctttagccagagatacaatgcatcatcattatcttccccggagctttgtaccgttacagctcacttcgctttgacatatccctacctcaatacttcattgtcatttctcattgaattctcgaattttcttatattctgccccctttaatataagcccgcacccgtaattcatgtaatggagccagaatagcgaagtcatcttcattaccgatggcgtgttgatgaatatcaacccgcttagggacgggctggaatggttggcctaacgagttcccgtcacatttttagctacaagtctcgtgagagcctgttagtcgagtctgtacagtttgtggttagatattctgcggtgggattctatggagtgtaatttgcgttagttgattggtttctacggtacaagacgctggtgcttaccgtgagcattgttaggttttggaggcgggggcgggggcgtcctcaggtaagtgatgaagatcaagttcaaatataccgtaaaagggtccgactgattgacacaatgattacaagcttgactttaccctaaacttgaaagatgttgatattgtaggtccacatggatgagtggggttgttgttgttgttgtattatttcatgtccatcgagatatgggcgaagcccgtatttctatgacctcccatggggtatggggacgtgctaagctatggtattatgtacaaagttgtgcgcctagagtaagcaactccttccaatgaatgatctggctagaggcctgtcagctgcccgtccttctccgaactgtgaaatggatgtaggatcttccgaatgcggtttcccgcctgccgggacggcggcccggcttgcgtctgttcttactgcggggtgcagttggtgctttggtgacggggtttagcccgcctgcttcgcgaggcagtatgccggtggatgagtagagtgttaggaaaatgttcaccataaattatagtccacgagtgtataagaacactttttgtagctagatttctttctatttcgaattacaaaattgatagaaagtcaagatgatatgctgaagaaaccaaatatgactttgcttgacaggattgcttgaatgtagcccgggattacgcacttacgtacttcttacttgcagcgcagtcatttatattttgatcctgctttattatgtctcatttatgctaagcattgaccacaagctcaagcatatttaaacggagcaccttaaacctagtatcataatagtcaggcctcgttgagatttcggagagcacacgctgtctgaagtggcgaggcgtttagggttatccacgcaatgtgtcatttttcatgattatataatcatgcaaaatctggcagaatttagaatgaagtggacggtgagcacgaccccactttggcaagaaaagtctataatgtggagtacaactagccctaatcaggtagtcttggcgccactcactaactatggacatatggtatgatcgtagaacaccgatgccgggccaaattcacccaaaagatcggggtttacaaaaaagataacggggatctaagctgacggggtttgactgcaacacaagttgccgtctcccgcaaagcccgcggtagtgaggcacatcgggaaggaacatccgtacctcgggatttgcctcggcaggccaatcggagtctttcgtatgtaagccatccggatcagtcagcagccccaattgattttccctctggttccgccggctctcaacattgttaacttgtgcaatctcctaaactcacggggatttttgtgtttggcttcttttcctcttcatctctttggctcaattcaactatggaggctcttttgcaacagtctcgcactatgtgccctttcctcaagcgcacatctcccgccaccctccgcactctctcaaccgctactcgtccctgcactagcccgggcggtggaaccatgtccaacctgcaggttcttggtcgccgatgcccagtcatgagcaaggctctggctgtgcagagcgctcgtctcagtggtgccaagcgcttcacctcgcgcgctgcgggagtcgcttccgtccagccattgcgggttccgactggcaagcgggcgttgcataccaccggtggtcatcccgccagtctcgcctctggtggatacgagaagaacgatcgaggaaaccctaacttggccacgctccgctcgtcccctaccgccgccagcgccagcgccggggccgcagtccgcggtccccgcccggaagcgccaaccaacgaaaggttcaactacgacgatttctataacgtggaattggagaagaagcacaaggacaagtcctatcgctacttcaacaacatcaaccgtctcgccaaggagttccctcgagcccacactgcctctgttgaggagcgtgtgactgtctggtgctcgaatgattacctgggcatgggccgtaacctgcaggtcttggactccatgcacaagactttggacacctacggagccggtgcaggtggcactcgcaatatctcgggtcataaccagcatgctatcgctctagaggaaacacttgccaagttgcatggcaaggaggctgcattggtcttcagctcttgctacgtggctaacgatgcaaccctagcaacactcggtagtaagatgcccgattgtgtcattctctcggacagcctcaaccatgcctcgatgattcagggtattcgccactctggcgcgaagaagatggtcttcaagcacaacgatatggaagaccttgaagccaagttggcctcgttgccacttggtacccccaagattattgcctttgaatccgtctacagtatgtgcggatcaattgcgcccattgaaaaaatctgtgatctcgccgaaaaatacggtgccatcactttcttggatgaggttcacgctgtaggcatgtacggcccacacggagctggtgttgccgagcacctcgattacgatgcgtatgcatcgcaggatacagccacccctcaaagcaccaagggcacagtccaggaccgaattgacatcatcaccggtaccttgggcaaggcctacggctgtgtcggtggatatattgcaggctcggcagctatggtggacaccatccgctcccttgctcccggtttcatcttcactacttcgctcccaccagcaactatggctggtgcggatgccgctatccagtaccagtcccaggaaccccgggaccgaattcttcaacagctccacacccgtgcagtgaaggccgctttcaatgatttggatatccctgtcatccccaacccctcccacatcgtgcccctcctggtcggtgatgcggagctggccaagttggcctccgacaaactcttggaggagcacgacatctacgtgcaggctatcaactaccccaccgttccccgcggcgaggagcgtctgcgcatcaccccaacccctggccacgtgaagcaccttcgcgaacacctcgttcaggccgtgcaggccgtctggaacgacctaggcctcaagcgcaccagcgattggaagcgacagggcggtttcgttggcgttggcgttgaaggtgccgaggccgccaacctgcccatctgggaggacgcccagctgggcctgaaggctggtgagaccctcgagaccgctgtcgctcgtgagttcaacgacgcagcttcccagaccaccgtgctgcccctgaaggctgctacccctctgaccgagaaggcttactcggcagtaaactccgctcccgttggtgtggttgcctagagcagacgaacgccgtcttttacgcttctcggtttttggggtaatagctacattattcccgtccattcatttattataatattgtatcgtacggacataacttgacgtatgcatccgtcttcaacataccacatattgatgtcatatcaactgtctgcctttattcaaatgatgtagtcatcttacagcttggattggccgttaattgcgcttttgtctgttgatgtatgccattgatttggttggcaggaccaagacggatgtcggatatcctgcctgcatctatattgatcgagtgtcatttattgggctcaagtgtaacaggttggaatgaacagagttgaagtggtattttctttgcatttcatgtaggcttcggcttgtgtagtatatgttgtaagtgctactatggaaatatggaaatggccagtagtattagggcactgatatatatattcgccttggatttgaactgcctccactcaattgcaaagaagcaatttcaaataagtttattttggatttataagtctttgaatagaaaaccaactggaaaaccgggcgaatcaatctagattctgctatatatgctagtagtgaaatagtataacaatttgtataaatactaacaatcgggcaaagaggcccaaaagtccacacagaatcaaagaaaaacgaccaagtaaattcatttggctatgtaacaacgtctcattgatatagaaacaggtagaagtaacaatttttgaaacacacaaaagcgccatatattcaaggaagcctgacaactcaagaccgacaaaccaatcaacctccctacctccgaccaccacggctaaccttagggaactcaacaggcacgcgcaagcgagcaacacgacgcgcatgcgcctccgcacgtccacccttaatattccacttggcgaactccgtctcacgcggcttatcaatgcgacaaccgagttcacggaagtactggtgaatagtattcggatcgagacgcagatcatcacgcagatccgaaggatcagtcgcaagctcgttgggcgcattaccaccgagtgagctggagccaccgtcgcgtgccggctggggcgggatatgcagcgagagcgcacagatggtagtttgcaggagggtgaagtcgttcttggagacgtagccgccgctgggcgcgaagcggcgacgcacggcatcgatcacggactccggaagcaggtctgcggaagcggcgtccggtgcagcggcgccgggcttgggcttcgtgacggaccccgtggtgtttgacaggatgcggcggaggtcttcgcggggcgggagacgcttgctgcctgggccgccgcccttggcgttcgcgcctgcgtttttgagacagcgtccgaactcgattagcagctggatgaagcggaggacttggaggtgagttatgttttcggagttgacgactgcaccgacgcggttcgagacgtagcgtgagacggttgtcacgccaagaccggcttccacttgtgacttccactcgtctacgccgtttagttggctgagggttgagtggctgcctggaacgagtgtctcaattgtgtagacgtcggaggggtgcgagacggctaggttcggggttgggaggggcttggcggcttgcacttcggcttgcatggcgagggccttggcgaggccggaggctgtgtttgcgggcagcgaggagatgagggctgcgccggcttgggggacggcgccggtgggggcgttggagagctgggcgttctcggccatggattgcacggccttgcgggattgtttggttccgaaggtgtttgttagagctgtgcgttgggcgcgcatagtgttctggtgctggttgttagttggatgccgttgatgtacggacttgcggatcgaagggcataccatctcttcatctgagtcgtcctcgggcttgcggcttctcactgctcctcgcagtgtcgctcgccgcacctccacgactttccatgtcttgcgctctgggtctataactgcgacatagtgcttcacttgggagtcggtatcatctcctgtgccctcacggccgacaaagtccaacttagggtggtctgaggactggagcagtatctctgaagagacaatgcccgggttccgagtcgatgccgcagacttggagacattggcgcggtttttgatatatggattccagtggagggatttcgagctttgaagaccaggtgtgtcgactgtaacgcaagaattcgattagcgatggtttacagcctggatgaaagccttcgactcaccaattaccggtgccagctcgctcttatcttcaacaacgctggcggccagcgggggcagctgctgcagcgcgggctttttgcttgggcgatcattgcctgatgaacgcttccgcttgtgatctgttttattggacggcattatggcgttaaagacgagagacaaagattgtagctctcgagaatcggctctagcgcggtgaaataaaatgtctggacttgtcgggcagaaatttttacgagtggagacctggcaggcggtgagtctacggcttaccgcacacaaaggaatattgacgtagatggagcgatcgcgacggcgatataaagagagctacgaatatttgagaacagctgctcgagaagtagccgagctccagtttatgtttacatctacaatgagtaagaaaggttgcactcatcaagtcatcgattcatctgcagtagctaaaccaagacctccgagctattccatggattttgataaactcccggaaaaaacctctccacaacttttgaccagcccgaagaaaggccgtaaagataatgagaattgaccagtcaccccaatgccgtgctcaaagaccgatggtttgcaccggccctccaacatccacctaaacacaggagcccctccgggtaataaccatgcatgacatcagatcgtagacgtgaatgaatccgaggtgttggaatgtgggtagactgttgttgtaacagcggattccatcaattcgatctgcgatttcgtcttgaagataggccggaaatcgtatccgtgcaggtaactcgttggaatgaggggcgtgtcgcgaagaaacgaaagtcgcaatcgcgtcgtcagttgtcgtgttcagcgttcaaacatgagctcgagcaaagagggctgagatggagggggcgagtagtttatttgctggtttggggattagcatattggttcggcgatcggaagctcaatggccttcacaagaccatcggcgcataatggaatgacttacgatctggcacgcatctttctgcgcttgcgcttgagacgacgtgtgcgcttctttctccacttagctctcatcttcaaactgttgactggttagtgcattgcgctcgaggaaaccttaagcttcaggaaagctacttacgatttcgaggatgaaacagagatagtagaaagaaagatgaagtgtgggcggcccgagacgcatttacgtatggtgcggctgactcagctgcgctcgcttaggtcacacacgtgacacttcaagcttccatctgtgacgacacatgactatgcccgattaggaaatttgatagggtttccctccatagaagagtttaagattacagaccatttgaaaataattgatgtcatacgaagcacgagtgagggttttacgatgggacaattaaaaattcacgagaagagcaatgccattactattattgaatagtatatcaagtaaccatcatatagctccgaaatcaagacttttgatgcgaatgtttcccaattatagccaaccgtatgttcgttaaagaaatataccagaatcgtcatcactcatggagtttgcaagatccgcacggcgagatccacaaaattaaaatgagaaaatgtccgccatacgaaagtagctatccaaactggatattttctcagtacgtgtaccgatatgtgggcgccaagtcgccgagatattcctcttcgtcgtcgggaatcgtagcaggatcaaccgcggcacggtcacgttttctgttctcataccacagggatgccatgtagctcgtgcatgccagagctgcgaggcaaatgaatgagaggcatatgatatacccggttcggaaatccgtgacaccattctttacaacaaaagaaaaagtagcgatgattccaccgatgttgccgaagccaacctgccatgcggttcccacgctgcgtcgatgatgaccacccaaattcatggcaaaccagcatacaatgaccggcatggcgctgtaacagccagaggtgagcaggaacagagcgccatattgcgcatgagtattgttgtggattgtcatgagcataataaatccgacaagggcgatcgccattggaatcaaggtgaaagcgaatcggtgtcgcattcggtcagagcaaaaggcgactatcattgagaagccgaatgctgcagcccagggaggaatggagtacagttgtgttttgatcgaactatagccgtaggtctggataatcgacggcgcgaagtatgcatatcctgtatgagagtgagcaataattcgcttaacggaagatggaaatgttttacgtaccgtaagccgggacaatcaaaccgaagtacatgaatcctccgataaagaccttgtctgggaaaagtcagtgcactgcaaatgaatgcaacagggattctcgggctatacttacagtctttgaacacaccgaggacctcacgcttgcccaagtgaacgttgtgagcagccttgccgacatccttggccaacttggcacgcatgtatgtgcgctcttcctcattcagccacttgacatcctcggggaaatcagcaatgaaaaagaacaggatgatcgcgaccacactggtcaagacgccctcgataatgaacacccagcgccagccactgtagccacgcatgccgtccatctttgcaattccactggcaagcagaccaccgaaggcgccggccagggaagtggagctgaagaagaaactgaaacgcttttgagcctcagagcgtgtgtaccacatgcccaacaaatagaagcctggcgatcacaattagcacctgtcttaggatgtactgttggtatttgctcttacatccagggaacatgcccgtctcaaagacacccaaaaagaaccgagtggccatcagtccaccccagttctttaccagaccctggaagagcaaggtcaagccaaacatgaacatgcatgccgacactaattccgaattagcaagtcgccctcaccaattgcccctaaaccaagggcgcaaagggaccaaaacacttacgccagacatggggcttcaacttcttgagcaagatgtttgacggaatctcaaagataatatacggaacgaagaaaattgtgagcgcggtgttatatttcgttccatcgacgatgtccaaatccttcttgagtccgagaatagcagcattgctaatattaactctgcaggtcgatgatgtcagatataagcaacacctggtcacacagatacacaatggtcagcttaccgatccaaaaaggcaagcagatacaaaatgcacagacagggtaggatgtgccaatcgaccttggcttgcaacttgcgcgcggtggtagtcgtgagaggaggcagatcgccgtccgtgtgggagctgacctgactttcggccgcgtcgatgtgctctttgctatagcggggtgattctgcgcggggggagtaccttacggtcagcatgtgttgacaaggatgtgctagcgcaagcgcgaattggccaaaccctaacaaggacggggtatatgtataggattgaacatacctgtgacacccattgtgagatgcgaatcgcactaggacactgcgcgcctgcttggaaggacaataataatggggatgatggaagggaaaagggaaattttgacttttaaggctcgaattcccaagcgcagctcgccaatgcagggatgttaccgaggtgctacgctcgatgccgagtctcaaacgtggggtaacttccggagttacggagaggaaaagcaaagctgaaaaagcgagtggtcaatcctggcgacttaaaaagattcgagtcacagggcgaatcatccctggagatatccccggacgatcgaggccccgatctcggcgccgatatgcattccgcgattttagtttttttagtttctttagtttattaaattttcactttgcacttctagttccttattgattcggcagaacctcgggaggagacaggtgtatatagctttcatctttcaaatcttaattcgcccttcccacggaggactacatgcttagaattcaatcagtcgtttccccgcaaaatggcttcaagatcacgtgattcatgaacaggggtacaccactttaaatgtgaatatccacttagccaccctgggaagtgcgggggggtttggtatttttgtatctgctgacagtgactcagaaaaagtgttgactcatatttttattgctttctgatacggatatactggccgttgtttccaaatttcgactagtagagaatcgaattgctagtactccgtacaacaattaccagtacggagtagaatatcaaccgaggtgttgacctttttgcggtgtgactgtatgagttggcgtattgtattgtaacggcggaccaatgaattctctgtgaattgcctttttcaggttagctttaccgcttccggtttagcggctcaataccgtacccttcgatcaaatgaccttgcccagtctctttttcttctccaagggcatcctgtagcatttcacgagatgcatgctgctcctgcatgctgctccgttcacaaatccaatacatcatgtcaagtaagccttctctgggcctagccactccgagtgctagcttatatacacttgaattactatcaaccagccccagccaaaaacagaattcgaaatccccaaggtcctcccatagtagtctcatgtccctctcaattcgtcggtgtatttgatagcacgtgcatatgttccatattgaatccaagctccatgggcttacccgaaataagtaggcgaaggagtccgcttctccaagtcttggcagaaatacttttccgaagagaaaggctcagaggagtggtcccgatccacactgtaattgccgtcactattgattatctcgcagttagtccacaattggccctcgaggttggaggctgcttcgtggttgtgtgctttgctgattggttccttaagtaacgcctccgtatgtgtgatcaattccgtaagcgtgcgatattggttgtgccagcacttgtcgatgatatcgtcaatcagcggatcatgatcgagcttcggaaaatttcatgtcctggagtaagtccatgaccttgggtccatactcgtaaggatcatcgccaagacattgattgccataaacctcaaatccatagttgatcaaatagtatagcgaaccgagggcgaactgctctgttcgagaacctagaaagccggcagttcctgccattccttggtctgcttcgttactattaattagtcttcctcacggacaagggcaagtttcgaaatctgttgcaaactcggctgtgcaatcaaaatccgacagtttagtcggttacgatcaagtaggatgttctctggtcgcaagtcaccatgagcgaggttaagcgatgcgagaaaagcaacactttgagcaagatcgttcatccctgggtgcataagagatcagtgccttgtaaagtgtatagaggaaacactgcactatggagggacatggtggatgccgggatataatcttgtagattttgagttctttgcgaaattgctctctctcttcctcgccggacttaggaaccttgaccacgattagaggatgagcctcatagacgaaggagagatgcctcctccccagatccagtgcacactagaaaatcgacgttggatatccctaacaagaaggacaagaaaatatacaaatccgtgtctactcggaggagaagtgagaaacgggaaggagacagggggcaatcagccacgtgatcgaggccttcttccttagcgagctgtaggaatcgaccgacatcttttctctttcacttattagcccccatttccgaatttgtcgagaagtacctatgcagtgaagacggaaagcccaaaggtggtttataagcgggcagacagaggatttaagaaatacctaacacgccctgggaagtaggagaaaggtatgattcacaaaagtacaacgtagtcctggtagaggcgaataagtgcgtgcgatgtgaattccaacagggatatccttgtatggcgctggaggatcgacgcgaagtgggcctttttcaaacaaagagaatcaggccgcaaagtggtttatatttttaagggagattggagacaacgtcgaggctttgatgctgaaatgtgtcaaaggctgcataaaacccaggggctctagtcatatactcaatccttggcctgatacagttttccttttgtttgctattttgatttctcctttcccttttccctttctcttttacccttgccatattccatgacagtcacttccaacatacaatctttaagcttgctctctatgttatttctctgtatgagttagcagtgacttattccaatcttcctcgaaccacccttcaactcccgctttcttttgcggtttccctcactaccactaccatcatgagcctcagaagaatcaaggtgcaggcatctagatactttactcgtcgtggatcttgtatattatttgttatcctgatatggttcctcttttatcatcttccagctccgccttccacccagaacaatacccgggcagaccgaccacccccagagcatcgagtagaggacacggcccgatttatctaccgctctccctttcgaaacgatccgaatgttcaatacgaacaacagctatcaaatgcgctggaagagattgaaaaagccgtattgacacaaagtgaggaaagcaacatatccaaagatagaatctggcagatagcgaaaagtcaaaaggataggggggaagactcaatagtatttaaagggaaaaataaggactggatatacacagtaagtactttggccggatccttgctcgactttgactgaaaccacaaagttagtcactgataaaaaggccgtcgagtttttgaccaacgagctgtccgccatccccgaaatcgcaaccatatacaaatcctaccctcaaaatatcctccgagcagacctcctcagatacctccttctctggtactacggaggcttctacgcagacatcgatgtcttccccgctcggagcatcaaagcatgcccagcactagagcctttcttcgcacttacaccagacggatacacaaaaagtacccatcccgatatatcgctcgtagttggaatcgaggtcgacgagccatacgcttcaccggaattcatgcgcgactggcactggacaaggagctacggactgatccagtatacgatgtatgccccacgacgcttcagcccgcttctccgcgaaaccatcgtgcgggtcctggcacatactaggcaatacaatggagaacataccagcttcttccccagtctggcgtatgacgagaagactatattaggagtcacggggcctgatgtcttcacggatgcgattcttgacacactttcctcctcgcttccttcgactcatccgttcattcaaaaatctgtcgacgcagatgcagatataggggatctaatctctgctgagactggggagctggagaaacgggtaacgtgggctccgtttcatagactccgtgaccctgtatgcattcaggctggtgaggctgtcccgaatgaatccatgggtggattgtgtgtgttgccaatcagtgtttgggggaatgggcagagacatagtgaggcgggagggtttaatcatcctgacgcatgtgtcaatcatcggtttgggcgaacgtggaaaaaagggtggtgggagtatatatttgggtgaagctttcattatttaatctaggctcgatagtggaatacgaatctttggcatagattgattgaaatcactcctctctagaaatggaagtttataaatttatttaatgtactagtggatgatagtagatgagactatacagcatgaatcaattgagtatgagtgtattgaaaagcgaagattattgacaggagaggaaagaactatatgagtcctttactgccagtagagaaaccaagcagcactaagctgagcgaaggcgaaaccccgatttgccgagttcgtgcttgatccactcaaatgatcatttatagcactggcagccttccttcttggggttctggcaacgagcctggttgacagaacaaccaccacagaacgcacatgtatcgggagcatagcagttaccctcgcctacaacacagcttccatggtggcccacacatttggtgcacgcattggttgctcggccctcaagatctctcgcctaaaatgaacatgttaaaaaatgaccttgtttcacaatgggggttagtcggtaatgtacctggactaagctttgctgtatggagttagttaccacatatagtaggttcaaaggataaagactcactggctctccgtagatgatatcctcgccagattggtaaacttcgagctcgacgccatttgcggcaaaaatgccactctgtgtggccgatgcattggcaataagaagggccaggattgcagtgccttggacaaatagtttcattttggaaaggaattgacagttctgagcgctagaagggtgtattggccttcaggtattaattggagttagatttgaccgaccaaggttgatgaccacccgcagacttttatatcttgaatttagtgattcaaaatatgtggtcttctactataatgctggcaaggtcaatatgcaatccttcagttcagattactagcaataatcctcgagttttacgtatatgtcagccttggcgatactgagggtagagttggcattggtagataccagtagacacagatcttcagattctaaagtgaacggacggctatcttgggatcatcaagtagtaagcccacctgagtgctcggtaggctttttgcttttttgaaatgtatattttgtatttccttggccatgctctacatggcaccctacctattttctgctctcttcgactaaatgattttgattgatcccgggtgtcccgaggtctgaatcgtaattgagattgggctgggccttgcgctgcaagttcccattagacccctttgaatgactgatacctgacttgtagagatatttggaactttcaagaccatacggagtatacaactcaaggattaaatacccataacacgaaattatctatagcataaagaattcgaaagaaaagcatgtttttcttcccgtgaatcggggatcggggaagctgcctgcagccgtgtggtggaatcacattgtcgaaaagaaaagtcatagccgtcttatacgagtgatctgcaaaaaaagcaacggactctatgagtcagatctttgaatgcatcaataccagccatggagataacacaaacaacggacacctgcatatgtgatgcccagatgtagtgagagaattatacatggcagctgcactgccgatccatatgaaattgatagggaatcccaaaaaagtacacttacccgattgagagagctcaaataatgtaacagcttgcaaagagctttattccactgctatgacctcgatctttattctttattaccgatcatgggaataaaacagtagtttgcggcggcgcaaatggaaggatctatttatagagatcttccaagttctacatgttttctgtaaaatagatctaagaaaaagatcgacaaaagctatggagattcgtgtgagatcagcttacgtccagggctgctggggtccgtatgcattcaatggtagctctgcacggccgcgcaaggctggatgttatcataatctgagggattgtcggcttattccggcgtggactgcatggccattttgggacaaaagcaaagtcgaataggtcgcatggtcagtctaaattatctacagagtactctgtagcttgcggctaataataagaagaagaagaagaaaccctcgggaatgagattgggaacaatgtgagggggttgaccgcctgtgacggtctcattgcactcactacgcatgcgctacgagattgatatctcctagcttgaagtgaatccataatattcagtctatcttgagtgggaggaactggatagctcgtgttgatcgaagatgcaagtatgtgatcacagctaattcttgaatattctcgcatcccagtcacaatcatctcactcaggccgcgggaagcacccaggttgtcacagactggctcggaacattgccactccactcctggccactgttagtggacaaaagaatataaatatcgttactgaacgtgttctcaataacaacagtacgagttccatccgggttcagcgaagcaacggattgcacaccacctccattggaatatgtgtagctcccggtaccacttagcacaatggcacccggcggcatgaacttgctgaactgagccatcatgtagtatgccgggttgaaagtatatccgccgttggcaatggttaccagaccttgacaggttgcacagccgccactcgacagatgaggaccatcttgatcatttgtgccaagtgtccaggcagtgacgcccgatgcccaattctgcaaaggccccatggtgaaatcggcggcttggttccatgctgcggacgcgggagtccagcattctgtcatatattgattgacgttgggttttgtctcgtggaattgggtaaggactgtccagtctacgttgctggcataacagtgccatgcaactccgtggacatactggctagccccattgatgacagtctgaggataggatggaacatctagtgtctatgcgttagtaaatagaatcctccctcaaagatcccgtattgtcaagtacataccagtgttgtgatcatatgcccagatatcggtgctcaggccggcttgagcgagagccggtccgacataattttgaatcaactgtgcagactcatagtcaaacacatacattgtaggatatccagcttggctgttcagaggctcgttttgaatggtaatcgcatcgatgtgggcgccgagattcgcgtaagcctggatgtacttgacaaagtactgcgcaaaggcactagcatacccagtactcccagtgcctccactggtcaagtagccatcattgaggttattgttattcgtggcgccatcgatcacaccgttcagcttcatccacccgggggcactccaaggcgaaccaagagttttcaaattcgactgaagagacttcatcttagccagcatcgtagccatggcgcttccacggtcgcccaggttaaaaccggacatagatgggtctgcattattcccattatcatcataggtatacgcagggtcaccagacaggtcggaagcgccaatggtatggcgcatcaaggcgaatccagcaccggcaccggtcatcagctcattaagcagttgttcaagtgtggaactggacaaggtgttgaaggaggtaactgtggcatcggtgacggctgctccgaagcccacgattgtttgtttgtgtccgctggatgtatcgtcgacggtcagctgccaggtcgattcggagcctggactgccgctgccttgaacgggtgcggagattgacgagagcttgtaattgccatttgagtttgaacagtaggctgatgcagtggtggctcgctttccgggtgacgcctctgctagcaccgaaagcaggagcagaggaagaaaagatggaagcatgttgtatactggtccccaagagaattttagggaaagccagtctcagtctttcgagggatagaggtgggaattgatgatcatcaggtataggcatgcattgtctttatatatacctatcaaagacaatattgtccaggctgtacccgtccatttccctaaaagagcaatgcgactaatcggccgaggggaaagtacgctgaaacgcctaagaccctgaatttcgctcaatttcggcataagctgatgaagaatactacagtatcaccgactaatgcacgccacatttcaccgacgggtccccgatagcttgtattgtcttggctatctcggggaaattgctaattcgagggtagttgcttccaggttagttgcttggaatacctttccccgcattctcgacggctttttcaatgccattgtgccacggagtattgaataatgggttgcctcaacggtcatgttgcttattcggggtggggttgcccggaagcggcatgaaacaataggatggggcgttgtataagcggtgattaccggaatgagaggggcgaggtgacagccacaaggcaacttgggaagttgtaatcaaagcagaagtaagaagtagtgtaagaagtagtgtataagtcgtaggaaacacttcctttgctgtccaatacttaacaaagagcaaaggggtcaaaacgagaacatttagtacagacgtctcaattaaccaagataaatatagctctccaattttgatgctattcacaatcgtactagtcgaaataatgaggtcgatcagggaagacttggcttaggggagatcaccatccctaaaaggcagccacgtgcagggccacggctaggacgggagaaccattccatgagaacgtgcaatgaattcgaagcatctagagccacgagtggaacttgtaagtggaacttcggtgatgttgaggaatgcaggttgtgtggtgctgaaaacaggtcacgtctgcagatactccgtgttgatgacgtcaacattctgcgaacaggccactcaagtcctaatcgtatatgtaacccctcctccgaatgattttactccttcaaacttctactactagaaataacctgcataatcaatctacatcatgagcggcaataaattccccgtcgatctcaagctgttcaagcaactgaagcttgacccgaagaccgcacagctatcagcccagcaaaagagcgacttgctacacaacatcaacattttcagagatgccatcattgcctttacagcgacgggcgctgcccgtggagtttcgggccacactggaggtcccttcgatacagcaccagaagtctgcattttgcttgctttcataaacgcgaaccccagcaaatgggtcgacgctctgtatgacgaggctggccaccgtgtcgccacacaatacttgctggccgccctggacggcaagattgagcctgatcacctgctggaatatcgtgctgctggctcccaccttcccggccaccccgagctcggtctcacccccggcatcaagtttagctccggtcgtctgggccacatgtggggtatggtcaacggcattgctatggccaaccaggataaaaacgtgattctgttgggctctgatggatcccagcaagaaggaaacgatgatgaggcagcacgcattgccgtggctaaaaatctgaacgtgaagctcttcatcgataacaacgatgtcacaattgctggacacccttcggattacctcaagggctttgatgttgctgggaaccttaagggacatggcttgaaggtccttagcgcccagggcgagaatatcgacgccctatatggcgctatgtgcgaagtcatcaaccatgacggacccgccgctgttgttgtcaaccgcaagatggctcctggaattgaggaaattgagggacaatgcaaggcgcacgatgttattcccgtcgacattgctcgcaaatacctcactgggcgcggctatagccaggagcagcttgctttctatgataatatcaagcctggctcaaacccccacacgtacaagggttcgaccaaagacaagggctcgaaccgcaacattttcggcgaagccgtgaatgatattcttgacaaattgagcaaggaggaggctaagcgtcgtgtcatggttattgactccgacttggcaggctccaccggcctgaaggctatcagcgccaagcaccccgaatcctttatcgcatctggtgtcatggagcgcggcaatttctctgctgccgctggctttgggttccgcagcaatggagagagacaaggtgtcttctctaccttctctgccttcctggagatgtgcatctccgagatcaccatggctcgcctgaacgactgcaccgtcctgtcgcacttctctcacagcggtgtcgacgagatggccgacaacacctgccacttcggtctgaaccacttcttcgccgataatggtctgatggatgccgagactaccaccctgtacttccctgccgatggcgagcagatgaaggccgtagtcaatgaggtcttctggaacaagggcctgcgcttcatcttctccactcgttccaaggtcccttacatcttgaaggagggcaccgaccagaagctctttggagagggctacaagttcgttcctggcaaggaagaagtcattcgcaagggctccgctggttacatcgtctcatacggtgatatgctctaccgctcgcttgatgccgtcgagaacctgcgtgcggagggccttgacgttggtctgattaacaagccaactctcaacattgtcgatgaggagaccatcaagttgtatggctcctcgccattcgtcctggttgttgagtcgattgcgcagaagactggtctcggctctcgcctgggtacccaactccttgagcgcaatttgacccccaagtttaagtctctgggtgctaacaaggagggctgcggtggtctgtaccagcaagtcaatgctcagggccttggaccagagcatatcatcgctgcggtcaagcaggtggctggaaaataaatgtgtgaatgtctaacgtaacgactttttcatgaaataataaaaaacccttttccatttgtcttttgttcatatcttacccatttcttctccttatcacagccaagacttcagcgccaagacctcaggacccctaaatcccgcccgtcgttccaatcagatatcgcggcagttgaagcgacatttggcttcggcactttccactgcattctccataattatcctcccgccgtactgctgattggctgaactctgcatagttttgacttggcagccaggactactcccaaaaagcactagatcgcaggacttgaaaagcacgcaatcgtgctaaaagacgaagtagggctaatgcgatattaggtcttctagatcgatattgatttcttcagggtagagaaaatccatatatagcgcatttccccttttttgtttagcgcctaagttagaattttatcttcgtggcttgaatcaacgtgcttgctatcctttaagcccaaaccatataatggccgaacgaggttctatctcggcatcgtccggtacgccatttgaaaagcgagtatggtatcgcggaacactcttcaatgcctgtattatcggggccgtcggattcacagccccgggcttgtggaatgccatgaatgctttgggtgctggtggcgcgcaggagcctttcttgattaatgccgccaatgcgcttgttttcggtcttagtatgtgatatgttgctgtaatcgcattggatttgaatcgggcttctcgctaacttgatttgcttgctagtgggcattttgtgtctgttcggtggcccaattgccaaccggattggcctgagatggactctgatgcttggtgctgtgggatatccgctgtattcgtatgtatcatgagaacaaggtgtgaaattgtgttatttgaagactgactttatatacagtgccgccttatacacaaataaccgttttgtgagttcttcgtcaacttgtacaacccaggaaagaagactaattcccatgtagggaaatgtatggtttgtgctggttggatcagtattttgtggtttatcgtgagtatcctatactgatcaaagaaataatatcgttgactaacatttatagcgctggtcttttctgggcttctgagggtgctgtggcactaggttatcccgagcctgcaaagcgaggccgatacatgaagtgagatatttcaaaaagtcctacagtgacaaaaagactgacttaaaaagcatctggctttggttccgtacaggtggccctatactgggaggtgctattgtccttggtctcaaccagtatgttaattccaatttgaattcacatcacggacataatttactgacgattggaaagtgctgccgatgcccatgcaaaaggaaaagttggatctggtaggtctattcaagctagattgaacaaaccgattgctaacacacgacagagacgtatctcatcttcgtcgccctccaatgtactgccgttcctatagccttcttcctcacgtcacctgacaaggtccaacgcaccgacggaagcaaagtcaggattatcctgcaggactcgtggcgtgatgaaatgaaagagctctggaaggtctgccagcggagagaggtatgtttaagatcattggttccatcgtgcctatgtgctatatgtgactgacattcctagattcttttgctattgcctgttttctgggccgcatacttcaatatgtataccggaagtatgtatcgtgtgtttgctcttatatgcaattgctgataacttggtccagatttcaaaacgtactactttggcgtgcgcgctcgcgcgctgattggattcgtcagtatgtttacacactcacaatatttggacacacttttgcatcagtgctaacatggaaaaaagcctacttcgccactcttcttgcatcaacgatcattagtagattcctggactaccgtggcctttctatcagaaacagaatcaagtacaggtacaaaatcacaccatccaaaattgaacttaggagcaaaattaacaagccacagctttttctacgtaattgtcgtccacatcgctgcctgggtctactgctgggttatccaagagaagtacactaggaacccaccaacacttgattgggccgacaaaggtttcgttgaaggattcttcgttatcctgctctggggtgagtcttatagattgatcaacatcccacatagcgctaacctatttcatcagaattcgctcagcaatcgctgcagaacttcctctactaccttctatccaccatgaccgacaatatctccgaactctgtaagtcgaaaattcaaaccgatcgtcctatctccagattactaataccatatagcccgcttgtccggtatcctccgtggccaagagagcttttcacaggctgtttcttacggcctcaactcgaagaaatggcatggtggaagagtgccacttatcgttaacactatccttctcggtaagtgatacacattgactggttataaagaagtagtgctaacttttatttacagttcttgcggtgtggcctacttggctcgttatcagggtccacgttcccatcgagcattccaaggagacttctgagttgccccaagcccaagacgaggagcagaacaacgttagtctctctgacaaggagacatttcatgttgccgaagcagttgcttcgaaataaaaagttggagttgttgaatgtccttgaaaaaagtacttaatctatttacgacacggggttgacgtctacacaaaagttccctcacacaaaatctattccatgaatcaatgagaagcctatacataatctgtgaataatcatctgttctttactcctctttcaaactgcgagaacaccctcaccattctggctttcctcgcgtaatttccgctctgcacggctctcactagtgggatcaagataggcttccgtataaggttagcacaagatgcagaattgaaaaccacaatctcttgacatgagtactcacgtatttcaccaaaaacggtggtccggataccttgtctagctcctttgtatgtaccagggataacccgatgaagggtacacctaagagatcgtcagttcccaagtccaaagccacaaagtgaacagtgcatagttaccgattatcccacattgcaacactgccaacagcccatttccaacgaacagagtgatcatcggccgagtggatatgatatgccaagaaatcaagaaccttgtctagaaaggcatcagccctaaaccacaaactgattcgttcagtatttcactcaccggattccactttcttaagctcagcaaatccagtcacaaatccaggattgacgttcaatgccttcagcttagtgactgggtgcgtgcgcacggctgggtggtgtgtatcgattggagggcgattgggacctgcaccccatagatcgatgatggtatcatctatttagttaatatgtaagcaggtttactactatggttatgaaggagacaaacactgcagccttgaggtatgcacggcgtgaaggccatctaggaaccttttgtacgcgttgcttagggcatcgtataagccatattgagatacctatgaaatcaacattttgtctcgaatgcggcctgtatctgtaacatacccaagctgtgtcgccaccaacttcgggatgttcttccattctcagtagggagtaggtaggtgctatgatgtgttaaagattaacagccagaaaatatggttcaccacatacgattgatctcgaatgatgtatcagcgtggaaatctccactcggctacagaagtagaaattgctgttagaattttggtttaagcattttcaagatatcttacccaaggcgtgtagcttaggatttcacggtgatcctcgcggctacctttgatattcacgaactttgtgctgggttagcaatgatgacaaaatgccatgaagtggttatggaacttcatactttttgatcctgataattgtcagctcacttgaatctgccttggaatccagaaaacttcatgttttagcttaccttttgagcagggtgtttatccaagatacctgcaagataaaattattaatccgatgccgccattcggaaatccatatggccttaccataatgctgaaacagttctacctggcgctcagtagtaagatcctgatcccgaaagaagacaactccccgctcattaacgagaagcgccaattcatccagctgagtctcattcagctgagacaattgcacatcctcgaggacagttccaatagactcagtcaagtcaaccggcttcgccacagagaatagtgccttcttctccggatctgcaaagaatgctcggtctttgggcggggtaaatggctcacggggtggttctggaggcacatgattcttgatcttctcgttgaaatgaggatggagtgtaatggggaatcccgaatcggcggaaatatgcttgcgggcttcgagattggccatattctgtgagctcagttgcaatgatgcgtgtaaacaagtaaaaggattataatctgggtgaagtggaagtagatttacttatttcgtgctttataatctgttgagctcatattcggcttggattgcgtcaaaacgctactagtcgatatgttcgagtccaatcggctatgtatttccctaatatggtgtattgttagattctatgtcgaatatgtggagagtacgcacgcaatgtagtctttataaattccgtagtggaatttccaacgttgctataataatacaggtgcatattgggatcacgtggtaccgatggagtatatgcatcaagcgaagatactctccgaacagtaattcagacggtccaatataaaagtgaccaaactgttaatgaggcatatgaagtcctaattttgatccaaaaagggataagaattgtcaatgtgtggggtggtgcaagcaagtaaacaagcaagattccaataactataagtctagttatgttttggggattgttttgggacccccccccttggttgttgggacccccctttggctgatctctgcgtgtctgatcccttaggcatcagctatttctgccatttcttttaattttctgccatacttatttctgtaagtttgaattcttgtttacatagtaaaaaatgcaccattctgctcaaaattatgattatttctttgatttggtatgctttacaggaaacaactgtttcaatctgaaccgggtgctgtaaatatcacgtggaatgatagcagtgtcggggtcagcctcatgcaattcggccatgatctgacgagtagtacgacccaatcgaagcgcagtaacaatctgctctcttttattggtaagctctcgggttcgctgtacagcgtgcgttgaagcaggagatggttggtggttatgggacgggttctcgattgtgacatgccaaagacctgttccgtggtctcgccgcagagccatagagaaggggcattctaacgccatagtattggtattgattcgcttcttcggttgaggccgatgctcacatgcatctggcctccgaccacgatcacagataagccggactgtcttctttaccccccttttggtagtcttagaccggcggatcgtaaccgcatacccatgtgggcgtgcgaagtcgttgatagcatcctttgcttcatcggaggtcgcgtatgtacgatcggtgggcggtagcgccatcgtgatcgcgcatgtcggctgtgtagagggtggaagcggctgtatgagggaatcaggctctggctgggcgctgggcgggttggattgggtgtctggattgatatcgggatcggtattggactcggaatccgagtcctcaaggtaagcaagccccaaagaggccatatcgaaaagataaatgctcaaaacgtgaagacaacgcgaaagggatcaaagatggtggagacagggccattgaacttgaaatctaggcttggctttccagccatcagctttgcgccggtaaagtacggacggagcttacttttctgctaagaagatcccggcccgaaaggggtcccctccgacttactgtaacgcgtcacgtcacgcgtgagatcaagtgccagatcatgtgccaaggcggccaggaaagcggtgagtcttgatggtaggcggtcagttgatgcctgaactaggggggtcccgacaaccaatggaggggtccccgatacaatttccttttaggtattaggacttgtagtaaaggcctactgggtcgcgtggctacaaaagcctctcatgcttttcatatcaagaaaatcgaggtctaatatgaggagctcagaatccaaatttgccagtgctcaaatatcacatattcgatggcgcaaactggagatggctatctgtctggctattcgaggaccaccacatgtccatatatagtacaacatttcactccacttccccattctcaatctccaacatcatttcctccgctttccttgctaccgttctcgcttcgtctccaatatcgcccctcatcctcgctacctccccaaatctcttccgccatagcagccacctctccttgcaaaagccatgtttgccttcccagagagggcctccccttcccggcgccatacccggatagccgctaagatcttcatcccattcatagatctctacgccgagtgtactgatccatacagcagcagaaggaatcgcctctaaggggtgagttagttacaactggcctataggtatttctagcgcgtcgcggagggtgaacattgtaaaccataagtatgcgaatacaggttcctcgattatcatcaaaaatgctatgaatttatcccagttgatgattttcaaaattgcactttgtcggtgatcagggggtccaataggtacggatagattccactgctcacggagtgcccagcctagtgtcgggaggtctttccaaatttgcatatcgtagagaatgagtgcgtccccgctggctgttttcgggcttgggagcttagaaaattggactaggatctcgacgagcttatcatggtattcagaggattcgcaggcgcatcccactatcacagcccacagacgaccaagacctgcttcaggcttcattgataaagagatcgaagcgagattcctcacggcttcttgtgcagagatgctgtcgctgaaaaggtcctataggacagcgaattgagaagtaaacatttcatctgtgacgtctgtcattttgagaaatctcaatagtaatttacagatgaatgtcgtgagtggcatacaataatagatcaaatgcaacagtaaggctagacttggtgaaaaatgagatgattaaaccaagcgtgcctcgtccgtcgtttagcgtggtattaaatgacgcacagggattattccaagtagctatcgaactagtttgctgcgccagtttatatatccactatcttgatgttcatcctcatggatacgattatcatgggggctcgactgtctgtcgactagagctatatgagcggggttgaatttgtcgtgagacagtatggttcctatcttctagaggaatataagtcgattatacgtagtccataaagtagagtcccagaactgaggtgggtatgtgggattagcccaccgactctaaaagcggtcaacatgatcgtcctaattattagtgacggaaaaacggtggtaaggcgagtgtattttgtggcagaaaaatcttaataaattctctaactctctaaaactgacaatagtcctaaaacatgacaatctgatggacaacttagtaatcaaaacaaacaaaacaannnnnnnnnnnnnnnnnnnnnnnnnnnnnnnnnnnnnnnnnnnnnnnnnnnnnnnnnnnnnnnnnnnnnnnnnnnnnnnnnnnnnnnnnnnnnnnnnnnnnnnnnnnnnnnnnnnnnnnnnnnnnnnnnnnnnnnnnnnnnnnnnnnnnnnnnnnnnnnnnnnnnnnnnnnnnnnnnnnnnnnnnnnnnnnnnnnnnnnnnnnnnnnnnnnnnnnnnnnnnnnnnnnnnnnnnnnnnnnnnnnnnnnnnnnnnnnnnnnnnnnnnnnnnnnnnnnnnnnnnnnnnnnnnnnnnnnnnnnnnnnnnnnnnnnnnnnnnnnnnnnnnnnnnnnnnnnnnnnnnnnnnnnnnnnnnnnnnnnnnnnnnnnnnnnnnnnnnnnnnnnnnnnnnnnnnnnnnnnnnnnnnnnnnnnnnnnnnnnnnnnnnnnnnnnnnnnnnnnnnnnnnnnnnnnnnnnnnnnnnnnnnnnnnnnnnnnnnnnnnnnnnnnnnnnnnnnnnnnnnnnnnnnnnnnnnnnnnnnnnnnnnnnnnnnnnnnnnnnnnnnnnnnnnnnnnnnnnnnnnnnnnnnnnnnnnnnnnnnnnnnnnnnnnnnnnnnnnnnnnnnnnnnnnnnnnnnnnnnnnnnnnnnnnnnnnnnnnnnnnnnnnnnnnnnnnnnnnnnnnnnnnnnnnnnnnnnnnnnnnnnnnnnnnnnnnnnnnnnnnnnnnnnnnnnnnnnnnnnnnnnnnnnnnnnnnnnnnnnnnnnnnnnnnnnnnnnnnnnnnnnnnnnnnnnnnnnnnnnnnnnnnnnnnnnnnnnnnnnnnnnnnnnnnnnnnnnnnnnnnnnnnnnnnnnnnnnnnnnnnnnnnnnnnnnnnnnnnnnnnnnnnnnnnnnnnnnnnnnnnnnnnnnnnnnnnnnnnnnnnnnnnnnnnnnnnnnnnnnnnnnnnnnnnnnnnnnnnnnnnnnnnnnnnnnnnnnnnnnnnnnnnnnnnnnnnnnnnnnnnnnnnnnnnnnnnnnnnnnnnnnnnnnnnnnnnnnnnnnnnnnnnnnnnnnnnnnnnnnnnnnnnnnnnnnnnnnnnnnnnnnnnnnnnnnnnnnnnnnnnnnnnnnnnnnnnnnnnnnnnnnnnnnnnnnnnnnnnnnnnnnnnnnnnnnnnnnnnnnnnnnnnnnnnnnnnnnnnnnnnnnnnnnnnnnnnnnnnnnnnnnnnnnnnnnnnnnnnnnnnnnnnnnnnnnnnnnnnnnnnnnnnnnnnnnnnnnnnnnnnnnnnnnnnnnnnnnnnnnnnnnnnnnnnnnnnnnnnnnnnnnnnnnnnnnnnnnnnnnnnnnnnnnnnnnnnnnnnnnnnnnnnnnnnnnnnnnnnnnnnnnnnnnnnnnnnnnnnnnnnnnnnnnnnnnnnnnnnnnnnnnnnnnnnnnnnnnnnnnnnnnnnnnnnnnnnnnnnnnnnnnnnnnnnnnnnnnnnnnnnnnnnnnnnnnnnnnnnnnnnnnnnnnnnnnnnnnnnnnnnnnnnnnnnnnnnnnnnnnnnnnnnnnnnnnnnnnnnnnnnnnnnnnnnnnnnnnnnnnnnnnnnnnnnnnnnnnnnnnnnnnnnnnnnnnnnnnnnnnnnnnnnnnnnnnnnnnnnnnnnnnnnnnnnnnnnnnnnnnnnnnnnnnnnnnnnnnnnnnnnnnnnnnnnnnnnnnnnnnnnnnnnnnnnnnnnnnnnnnnnnnnnnnnnnnnnnnnnnnnnnnnnnnnnnnnnnnnnnnnnnnnnnnnnnnnnnnnnnnnnnnnnnnnnnnnnnnnnnnnnnnnnnnnnnnnnnnnnnnnnnnnnnnnnnnnnnnnnnnnnnnnnnnnnnnnnnnnnnnnnnnnnnnnnnnnnnnnnnnnnnnnnnnnnnnnnnnnnnnnnnnnnnnnnnnnnnnnnnnnnnnnnnnnnnnnnnnnnnnnnnnnnnnnnnnnnnnnnnnnnnnnnnnnnnnnnnnnnnnnnnnnnnnnnnnnnnnnnnnnnnnnnnnnnnnnnnnnnnnnnnnnnnnnnnnnnnnnnnnnnnnnnnnnnnnnnnnnnnnnnnnnnnnnnnnnnnnnnnnnnnnnnnnnnnnnnnnnnnnnnnnnnnnnnnnnnnnnnnnnnnnnnnnnnnnnnnnnnnnnnnnnnnnnnnnnnnnnnnnnnnnnnnnnnnnnnnnnnnnnnnnnnnnnnnnnnnnnnnnnnnnnnnnnnnnnnnnnnnnnnnnnnnnnnnnnnnnnnnnnnnnnnnnnnnnnnnnnnnnnnnnnnnnnnnnnnnnnnnnnnnnnnnnnnnnnnnnnnnnnnnnnnnnnnnnnnnnnnnnnnnnnnnnnnnnnnnnnnnnnnnnnnnnnnnnnnnnnnnnnnnnnnnnnnnnnnnnnnnnnnnnnnnnnnnnnnnnnnnnnnnnnnnnnnnnnnnnnnnnnnnnnnnnnnnnnnnnnnnnnnnnnnnnnnnnnnnnnnnnnnnnnnnnnnnnnnnnnnnnnnnnnnnnnnnnnnnnnnnnnnnnnnnnnnnnnnnnnnnnnnnnnnnnnnnnnnnnnnnnnnnnnnnnnnnnnnnnnnnnnnnnnnnnnnnnnnnnnnnnnnnnnnnnnnnnnnnnnnnnnnnnnnnnnnnnnnnnnnnnnnnnnnnnnnnnnnnnnnnnnnnnnnnnnnnnnnnnnnnnnnnnnnnnnnnnnnnnnnnnnnnnnnnnnnnnnnnnnnnnnnnnnnnnnnnnnnnnnnnnnnnnnnnnnnnnnnnnnnnnnnnnnnnnnnnnnnnnnnnnnnnnnnnnnnnnnnnnnnnnnnnnnnnnnnnnnnnnnnnnnnnnnnnnnnnnnnnnnnnnnnnnnnnnnnnnnnnnnnnnnnnnnnnnnnnnnnnnnnnnnnnnnnnnnnnnnnnnnnnnnnnnnnnnnnnnnnnnnnnnnnnnnnnnnnnnnnnnnnnnnnnnnnnnnnnnnnnnnnnnnnnnnnnnnnnnnnnnnnnnnnnnnnnnnnnnnnnnnnnnnnnnnnnnnnnnnnnnnnnnnnnnnnnnnnnnnnnnnnnnnnnnnnnnnnnnnnnnnnnnnnnnnnnnnnnnnnnnnnnnnnnnnnnnnnnnnnnnnnnnnnnnnnnnnnnnnnnnnnnnnnnnnnnnnnnnnnnnnnnnnnnnnnnnnnnnnnnnnnnnnnnnnnnnnnnnnnnnnnnnnnnnnnnnnnnnnnnnnnnnnnnnnnnnnnnnnnnnnnnnnnnnnnnnnnnnnnnnnnnnnnnnnnnnnnnnnnnnnnnnnnnnnnnnnnnnnnnnnnnnnnnnnnnnnnnnnnnnnnnnnnnnnnnnnnnnnnnnnnnnnnnnnnnnnnnnnnnnnnnnnnnnnnnnnnnnnnnnnnnnnnnnnnnnnnnnnnnnnnnnnnnnnnnnnnnnnnnnnnnnnnnnnnnnnnnnnnnnnnnnnnnnnnnnnnnnnnnnnnnnnnnnnnnnnnnnnnnnnnnnnnnnnnnnnnnnnnnnnnnnnnnnnnnnnnnnnnnnnnnnnnnnnnnnnnnnnnnnnnnnnnnnnnnnnnnnnnnnnnnnnnnnnnnnnnnnnnnnnnnnnnnnnnnnnnnnnnnnnnnnnnnnnnnnnnnnnnnnnnnnnnnnnnnnnnnnnnnnnnnnnnnnnnnnnnnnnnnnnnnnnnnnnnnnnnnnnnnnnnnnnnnnnnnnnnnnnnnnnnnnnnnnnnnnnnnnnnnnnnnnnnnnnnnnnnnnnnnnnnnnnnnnnnnnnnnnnnnnnnnnnnnnnnnnnnnnnnnnnnnnnnnnnnnnnnnnnnnnnnnnnnnnnnnnnnnnnnnnnnnnnnnnnnnnnnnnnnnnnnnnnnnnnnnnnnnnnnnnnnnnnnnnnnnnnnnnnnnnnnnnnnnnnnnnnnnnnnnnnnnnnnnnnnnnnnnnnnnnnnnnnnnnnnnnnnnnnnnnnnnnnnnnnnnnnnnnnnnnnnnnnnnnnnnnnnnnnnnnnnnnnnnnnnnnnnnnnnnnnnnnnnnnnnnnnnnnnnnnnnnnnnnnnnnnnnnnnnnnnnnnnnnnnnnnnnnnnnnnnnnnnnnnnnnnnnnnnnnnnnnnnnnnnnnnnnnnnnnnnnnnnnnnnnnnnnnnnnnnnnnnnnnnnnnnnnnnnnnnnnnnnnnnnnnnnnnnnnnnnnnnnnnnnnnnnnnnnnnnnnnnnnnnnnnnnnnnnnnnnnnnnnnnnnnnnnnnnnnnnnnnnnnnnnnnnnnnnnnnnnnnnnnnnnnnnnnnnnnnnnnnnnnnnnnnnnnnnnnnnnnnnnnnnnnnnnnnnnnnnnnnnnnnnnnnnnnnnnnnnnnnnnnnnnnnnnnnnnnnnnnnnnnnnnnnnnnnnnnnnnnnnnnnnnnnnnnnnnnnnnnnnnnnnnnnnnnnnnnnnnnnnnnnnnnnnnnnnnnnnnnnnnnnnnnnnnnnnnnnnnnnnnnnnnnnnnnnnnnnnnnnnnnnnnnnnnnnnnnnnnnnnnnnnnnnnnnnnnnnnnnnnnnnnnnnnnnnnnnnnnnnnnnnnnnnnnnnnnnnnnnnnnnnnnnnnnnnnnnnnnnnnnnnnnnnnnnnnnnnnnnnnnnnnnnnnnnnnnnnnnnnnnnnnnnnnnnnnnnnnnnnnnnnnnnnnnnnnnnnnnnnnnnnnnnnnnnnnnnnnnnnnnnnnnnnnnnnnnnnnnnnnnnnnnnnnnnnnnnnnnnnnnnnnnnnnnnnnnnnnnnnnnnnnnnnnnnnnnnnnnnnnnnnnnnnnnnnnnnnnnnnnnnnnnnnnnnnnnnnnnnnnnnnnnnnnnnnnnnnnnnnnnnnnnnnnnnnnnnnnnnnnnnnnnnnnnnnnnnnnnnnnnnnnnnnnnnnnnnnnnnnnnnnnnnnnnnnnnnnnnnnnnnnnnnnnnnnnnnnnnnnnnnnnnnnnnnnnnnnnnnnnnnnnnnnnnnnnnnnnnnnnnnnnnnnnnnnnnnnnnnnnnnnnnnnnnnnnnnnnnnnnnnnnnnnnnnnnnnnnnnnnnnnnnnnnnnnnnnnnnnnnnnnnnnnnnnnnnnnnnnnnnnnnnnnnnnnnnnnnnnnnnnnnnnnnnnnnnnnnnnnnnnnnnnnnnnnnnnnnnnnnnnnnnnnnnnnnnnnnnnnnnnnnnnnnnnnnnnnnnnnnnnnnnnnnnnnnnnnnnnnnnnnnnnnnnnnnnnnnnnnnnnnnnnnnnnnnnnnnnnnnnnnnnnnnnnnnnnnnnnnnnnnnnnnnnnnnnnnnnnnnnnnnnnnnnnnnnnnnnnnnnnnnnnnnnnnnnnnnnnnnnnnnnnnnnnnnnnnnnnnnnnnnnnnnnnnnnnnnnnnnnnnnnnnnnnnnnnnnnnnnnnnnnnnnnnnnnnnnnnnnnnnnnnnnnnnnnnnnnnnnnnnnnnnnnnnnnnnnnnnnnnnnnnnnnnnnnnnnnnnnnnnnnnnnnnnnnnnnnnnnnnnnnnnnnnnnnnnnnnnnnnnnnnnnnnnnnnnnnnnnnnnnnnnnnnnnnnnnnnnnnnnnnnnnnnnnnnnnnnnnnnnnnnnnnnnnnnnnnnnnnnnnnnnnnnnnnnnnnnnnnnnnnnnnnnnnnnnnnnnnnnnnnnnnnnnnnnnnnnnnnnnnnnnnnnnnnnnnnnnnnnnnnnnnnnnnnnnnnnnnnnnnnnnnnnnnnnnnnnnnnnnnnnnnnnnnnnnnnnnnnnnnnnnnnnnnnnnnnnnnnnnnnnnnnnnnnnnnnnnnnnnnnnnnnnnnnnnnnnnnnnnnnnnnnnnnnnnnnnnnnnnnnnnnnnnnnnnnnnnnnnnnnnnnnnnnnnnnnnnnnnnnnnnnnnnnnnnnnnnnnnnagtcacgtgatccaactgtatcagggatgaaaaatgacagtattcatcctagattctgacaattagtctattgtaggcctgccctctgtggagtttatccaaaaccacgcacaattgtacgttataattatcgtctcttagtaaggctgattaccaaacactatgagtactaggtacacagtcgttagatgtattcctgagaagagatctaaattgatgcatcggacataatcttgcttcaacagttatgagatgcaaactccaaattcgagccgtcatgacttggcatgggtatcatcagaagtatcgtcgttctttcctttgacagagagccactccagccccaatacaccgagaataccaaagcaagagagggcgacgctcacgtagaatgtctgatctagggccttgttgtaagcaagcaggacaacatcgtagagctccttaggcacttggctcttgaatttcgttgcgccggctgcaataatttcagtggcatcaacatccggagcatattgcgccatatttgttttcagctgatttgtgaacacattctgcgcaacggagacgaagaccgcactggtgagattctccgtgaatataacaacagcggtgccgatggggatatcctccaatgatagcgcagtttggggtgcggagaatgctgtctgtaaaccacacccaactcccgctccaagaatcacttgatatccaatccattctgcgtggccggagttgacgtctagcatggtgagcagaccggctccgattgccatgaaagccaccgcaatataggcccattgtacgtagtacccaaacaccgaagtaagaccgcccgtcacgaacgagaagagcacgtagctcagtacaagaggaagactcatgacaccggacttgattggggtggctcccttgatggcttggaaccaaatttgaatctgacgaacaagttagtatgctgtaatttagggtttatccaaccccacaaggagctatacacacgtaatagagtatgacgaaaaacgcagcgacgatgcatgagccgaacaaagatgagccccaaatattgcggttgtagaaaatcctcttggggacggttgcaagttcaccggaccgaagctgaacaaacccaaatgcgaccaaaatcacgaaggccactacaaacagagcaatgattcgcccgctggcccatgggtatttggtaccaccccattgcagggcaaggagcaaacaaatgataccaggaagtaaacagagggtaccgggaatatccatctgcctcagttgattgatgaagccgagtttacctgccttacttcctttgaaagaagaaacgaagaataaaatgaccagaccagcaacaaacccaagaggaaggttaatgtagaaacaccacctccaagtgagtttggcgttattggtgaaggcaccccctatcaaaggaccagcaatggcagaaaatccgtacatagcaccaagggccccaatcaacataggacgttggcgtggcggcaccgagtaggcgatcaataaaaacgaaccgtttgagacaccaccaccaccgattccggcaatagcacgccccacaatcagagcagtggatgtaggtgcaacaccacagatcaaagagcccagttcaaaaataaacagggaggccaagtagacccatttgacggtgtagaatgtgaaaagctttccccacatcagctggaatgaacatactgtgagcatgaaggcactcgcgtaccacccaacatcttctaatgcgttgaaatcatcggtgattttagggatggcgctggaaataattgtgttgtctagccccacaaggaacatgcagaggctcaagctgagagcgatgaggatgagcttggcctttccggggtactgaggttcgttctggttgctgagaggcccagaatcatcggttgacgttggtgtacgtttttcagtctgttgtatttgcagaggatctagaggatctgctgtagatggcggattggtgggtttgtcatgggggagcttcatggttggagaagaggtagaaatatacaaagacctgaaaagtgaacagatttgccggctttctcagatcgtcgcatattgaacaaggatatgaaaaggatattagacttttatattgaagcttccacgggttcctctagatccgtaaggggaatagtggatcacgccgaggcatgagtcatgttcactcattgtgacctcctggtgatcaaggcgctttggggaatgcatttggatagtttgttaatccctaataattgcaaaggcaatgtcagaattgggaaagcctggtagccgtcttaccatcccaccctgacattgatacctggaacaggtatgggggcggtaagacggctagtacctaacccagtgagacaatgttatgcagcaaacccatccaatacggtaggcggtcggcttctgccgaaaagtgaggttatatcggactttaaggatgctatttcgcccttcggggcatatggtcaaatgaaaatatacagagaagattagcatggcccctgcactaaggatgacacgctcaatcaaagagaagctacctatttttttctcttttacacgtcttttattaagcttatagggtggaggccttttttgcaatatatgattggtcctacgcaattgagaagtcacgtgtaaagccccatagccccacgtcgcaggtacgaaaccgaccaacggcgattgctgaatttattcccttccaacttcacagatctcattatcacgatgttaaagcaaacttcactttcagcctgtaggtgatatttccagtcgaacatagctgtaaatagagaaatgcaattctactaaacggtccgatctcgggaggtccacggactacggccggacccactcttccccgcggaatttcccacgactgatcttccaacagaaggccgaataagggtggattgaaggttgatgaagcgcattaaacgaggcaactagctggtaagagccaggcttcaagcaattgctccgtattatcctacgtttaggacaaaactcgacttcgccacacatctcaggctcagccgaggggaacttgccgcgggatttccctccacccgaaaagcattgacaaacaagatggaaagcggggacgagcgaccataccggtctcacacgaagccagcatgcgtaccgtgccggcggaggaaatcgcgatgcaaattggagccccacaccgcggcctgtctgatgtgtcgtgcacacggcacagagtgtacatttcccaacggcagaggaaagtcaacaccgcaaaagaggtattctacagaggatagcccaatacaaccgcacccgactttacgaactccagccgtagctgcccggccactgaaccggttaccgccaccagtagcgacttcgccgcagttctcgattgtcacacaggctcagaacgaacaggatacaccgctgtctcttgaagccgacgatgataatccccatatcctcggtccggcggtgactggggataatcatgtcttggctgactacctgtctaacatttcgggtggccaggggattcgtgagattcgtccagtcgagccgggtagttcctcatccccggttatattcaccaaggtgcagaaaaggccgttggggctcatggtgaactccagtccggcattgcataagttacaaaccatcgaaaagcttgtagagccatggggaccacacttgatagacatgtgagttagatgatgttggttagtattcgcgagaagtttggaaactaattgtccccagatatctgagaaagatcaatccctgcatcccactactcgaagaaagttcctttcgggcgcaatacacaaatgccagacatcgcatttctcctgcgcttttggcgtgcctgtatgcccacgtgcttacccaatggcaacatgacccccttttgtcacgagaaagatgtccagacattcgttttgtctggaatcttgctattgaagcgtcctattcggagttgcatgcctcagctggaatatcaacgataaaggccatcctcctcgatgttgggggtcgtccaaccacatctatgacaggcaacggagtaaggcttggttcggctgttgcgttgtgccattccctgggtttaaatcgaaacccccttccgtgggatatcccacaggaggagaagcacatgagaatgaagatctggtggtctatattactccatgatcgctggtatgttttcaagaacgaacctttcaaacagtgcaatatttcaggaactcatcatcaaacaggtcaagtctggcgtatggaacacctccccatatcaggagatcacaatacgatgtaccactaccaaaatctgagtacctgtcagattgggaacgagaccatgaagcaaacgcggttttcatcgagcttatgaatttgaccgatgtgctagatcactgtctggagcaggtgtatagcatccgaatagagacccaagcaccaagcaggaatctagaactagagttgaacaaatgggtggactcactcacaggagacatccgcaaaatcatcatccgtggctcaaacctaaatatacccggatcctctaatctccgtctggcatacctcgcaacaaggctcctcctccggcgcattgacctagatcgagagcggcaagcaccagactcgaatgcagagcacatggccaaccaaatcatggaagcgcgcaggacggcggaggacattgtggttctggtccaggaactcggagaagcccagctgggtgacttctggttacctgtcgtagcatttacattttcagcaacggtgacgtttttgattcggtgcgcactagagacagagcaggcagcgggtcttgcacagagtggttctctgcgaatggcgaatgaccttttggattcgttacgatcgcaccacaagaactttgggtgggatctaggtgatatctgtctcgcacagcattctgatgtcattgacaagctgttgaagtcagagccaccgcttgagaactcgggggagacaaatcttgatctccgtcagccttttatgcctgatatgactttcgttgatgatatgtttccaagtacttgggatatattgcagattatggagtgaatctaataaaaatatttgaacaacagctgcatattatattgagacccgcccaggaaaggttcagacagggaggcaatacggtctttatcgaccaagacgttcagaagagatcctgcagtagaatatgccgtgttcacgcgaggtagattcgacttcctgccaaccgggtgcgcgtgtattgatatcgagggggagacatcgtttggctgtgtcattgtggttatgggtgttgtgagtttcaagtcgataaggccgtgcctgaatccgctgtggcatagtggcagctcgagttgcgcagttgggcctcaacatcacggtatgtgcatttggcgtttggcacaattatagagtggtgtgctaattgaccccccaaaaagcggatttggaactctggcgtaaacaggagtcggaattcctgcgtcactgcagtctgcagcggtcatgtattgattgatatacgagcgaacttacatcatctgtgaatcactattgagcattttctcagaatggccgacgtctatgatgagatgcttgctatcctacaggacctattcagcgatagaatctctacgcaagaagccgtgagggatctcgcttcgaccaccttatcagtagaccctcctcaatacggtctttataatctttggagtgtgatagtaacatgtgcctgcgagtcctctggataccatgataagattgtcgagctcctagtccaactctccaagcttcccagcgaggatatactcattctctacgatatgcaaatttggaaagacctcccgacactaggctgggcactccgtgatcaccgacaaagtgtaatttcgaaaattatcaaccgggataaattcacagcacttttgatggcaaccgaagaacctgtattcgtatacttatggtttacaatgttcaccctccgcgacgcgctagaaatacctataggccagttattactaactcaccccttagaggcgattccttctgctgcgatatggatcagtactctcggcgtagggatctataaataggatacagatcttagcggctatccgggtatagcgccggggagaggaggccctctctggaaaggcaaacatggctttttcaaggagaggtggcagctatggcggaagagatttggggaggtcgctaggatgggcgagattggagacgaagcaagaaaggcagcaagggaagcagagcaaatgatgttggagattgagaacggggaaatagagtaacaaattgaatgtatagacataaaactgaccatatggacttcgagcttgaagtaaaagacatcattgtaagttcgaactgaaagataattactcatctggtgtccaggtctctgtataatatccttatcaaattgcacctattgcgaggaaccaggtcgatcttgatagaaaaaagagtgcactcaactaaatgactaacatggagaaagaaagaagaagcaagttgtaaagtggaagcagctagttgatatagctgaccatgcaaacgttgcaaacaaccaaccttctcgcttacctatctaacaaacaatctatggcgagcaagcaaatatgaagcatatgataatgacctatcttagatcgggacactagtaggagatttgccaagctaggatttgcatggtaagataaaccaaacccgaatgcatatagtggtactattgaatcttcctaaataaatctagcacgtaatagcgagctaaatggcgaaaagaaaaagcttggcaggtggaggtggcgacgtagatgtgccaagttgggttgactaaaacattcaacaccatgccatttcgcgcaatgatggttgttttgttattatcacgtcatgtacttgaggtcttgggaaaatattggtttcccccatggcagagaacttttagctgcaggtagttacatgctttttcccgatacactctcttcttttttctctttgtgtccaccaaaccacagaaatcctgcacatcagagattcaggcgattcgctcggacggacgactaagcgtcgggttgaaggagctacctcgaaaggattatgatccactaatcagagggttagaacggatcaggaacagattccgatgtgtcgcgatctgcgggatcataggccgatatacatgacccttcggatttcaagattggtccgacggaaccggcccggcctgctccacatggttccgcacgggcccttgcttagagttttgtgtctggcaaagatatacgattgatcttgctctttcacatcctctgtttgcttatcccttgtccaaccattgctactggagaaagtgaccgtaacctagagattatgataggaagtgtgtgactcggagtcttcgcaattgctaactatgagtggtctcgtattactcaaccccatttctagagccaagaaagagcgagataaatctaaattatggcgtgataacatttccaagtaccctcgaaacgatatataactactcattcagctcattcattccttcatgataagtgtctatttattcaaagacccaagtcgacggtgcacgcctctttccattgccaccaagaaacaagctacacgcacatatggatttggcctccaaggctgaggctacggccacggagagtctttcatctaataacgagagagccctcgagagcaaatatgccgatgaaactctgcgcattcttgagcttcatggagactctgttgggccattgacgcccgagaaggagaaaaagctgagacacaaattgtactggaatatcttcggactactctccgctatcaacctactgctatttgtgagctcattatacgatcatcttgttcacagcctctaacttctctagatagataaatccactctgggctacgccgctattctcggcctgttcgaagagactggtatcacgaaggctgaatacaacaatcttgggactttcttctacgtcggtacgtgacattattgtttctctcattgtaccttctctaacattcccataggttacattgttgcgcaatggccgggacattatgctatgcaaaaactaccatttggaaaatttgtcgctgctcttgtcttcatgtggggtgtcatcctactacttcattgcgttgccacaacgtattccgctcttgtggtcctccgactagcactcggtgccgctgagtctgtcgttgtacctgcaatggaagtcacaattggaatgttcttcaatcgttacgaacagtcgttcctccaaccctttctttggttgacgtcggcagccgcccccatatgtgccgcatttatctcctacgggttactttggagtcatagcgccgtcctgccatggaagctgtttatgattattactggggctgtctcggtacttctttcaattgttgtttggtttcattatccaaataatccagccgatgctaaattcctgtcactggaggaaaagattcacaccatcagacgggtacacgagtcaagtcaaagttctattgaacagaagcagttcaagaagagtcagtttatagagacgctccgcgaccctgtctcatggctattcgctctgcaggcctttaccctgatgatgtctaataatctcacctacgggcagcagaacctcattaccaaggctcttggggtggacagcctgggttcgacgctcgtggctgcagctggtggcggtttcggtgtcctggtctgtctcgcaggagcatatgccctgcgatggtggccttcaaatcttgccttccacggactcttctggtgtcttcctgcaattgcaggtggagttggaatggtcgcaattgactgggaccagaagttagggatgcttgcttgtctgctcttggctggccatacctatggtaatacctacattatcgcgttgggttggactacatcatcggcagccggctacacgaagaagctgacccgaaatgttatgttcatggctggttattccattgccaacatttgctcgccacaaatatgggttcctaaagacgcacctcggtattatggtgcctggatctccatgatagtggtcagttgggtgggcacaccgttgatccttttcattatacgcttcattttgaaacgcaggaacactcaacggaaggcttgggctgcatccttgaccagtgaagagagaaaggctcacgagttgggagtcgtcgaggagcttgatgaaaatgggaatacgatacgcaggcaagttgaaattgccatgttggatatgactgatatggagaacccgttcttcatctatcctatctaaacgacacgccattggaaattccgtcaccatatctctagagaaattatcggctagggaaaatatacatactatcgtcgctctgacaatgtcgaagtacacacttcgccggataacatattattccaagcagatcggttgcgagggtctgtaatttatgtaatacccggacctataaattactatgcgttgttagtttactactttcagtttagcacctcaagacctcgttctgtaaggtccgccttctgttgctccggcataaaaagctcgccctgcccttggtataatgctaaagagatcagcaccgaacgcggggaacgctgaaatgtaagagcatgaaagaggttttgtttgctacaatcttcgacatgggttgtctgagatgatagtattcactagacgggtagaatgccctccttctcctagacacgctcctttatccgggagacctatatatagccgtatgaatcagtatacgctcattcgtagaaaagttggcatattggaggtattgcgtgttatttctccatggtcgaaagtacttaggggtacaaggtggggcggatgcaacacagacagataagaaccagggcctccagcaagcttggcctaattacgcagctcgcttgttgaccgttaacgcggggttgtctgaccttcctccccctcttcgcagtcggtcacgaccagctcaacggacactagcttggcgctttccgttacatcaaaatgtcagaaacacttattctacgtacgtcgcacaactcatcttccaacaaatcaacgattctcctcgttcatggcggattctgtggccaggagtaggacgctgtatggccgcttctcgtcgcctaccacgtgctaattcccgacctccctgcccacgggcgatcgcttgagactagacctctggaaatcaacgacgccgctcgccgtcttgcaagtctgatcgaggctaaagcgcagaagcgaatagctcatatagtcgccattagcattggcgcacatgtcgccgctactatggctctgcgtcctgtttcctttcctttcctctctatacttattgtttcgttagacaacgcatttcttctattagaaagaatctggcatataacaactttcatctccctggggtttcatcatctaattgcggtcagatcggatgagagtgtctaggcacgcaggggcgtagtgcgtacctagaccacgaaaataatcaagacgataggaaagggggtgaatcttagacaatatttcaatgaaccaatcataggcgtagatacagccaaattccaggcattaaggcctcaatatggtggaaatgatccttcgcactatgccccttcgtacctagcgtctagtgccgtaatttctcctactagtcagtataacgaaagataaactagcaagtacagcggtcactgtcaacgccgcttgtcgcgattcagtcgctcaagacacaatcgcctttttcagtagcgccccactcactttagataccaatgtcaccgattctgtagcctgtgcgtcaaaatgcgagactctcaacggctgcgaatcctggcttttcaacaccggtggctggtatgacctgttccgcaattccgccgtggccactgcttcgagcccgcactttgtctttggggggtgcgcgaaagacagtcctcgttcgtctgttgttgtttcaagcattgcttctgctacacctgtaagtggctctgtgcaaacatattcttagagaaaagcaagcgggaaagggaaagtccctgtagccgtacataaacacaatagtatcagcactgactaatggtcttttcttcggtatcctagatcgttgcgaatctgcatggaaaaagacatctcgaagctcacaagaagcatgggcattcattccacagccactagtagggcaagtaaaggcacggagcttctggtgacctgcatatcgcaccagcgcttgctttggtcacctcgcgggaaaaaaaaggagagggtttgtttggtggcctcaggcgctctatgtagggtcagatagttccaatacaacttcctcctttgcttctagattttttactctgtagtccccgagaagcattcatatcaatttaacataaaaagagaaaatggtggaattttcgctgttgctgttgctttggcttatcctaagattatcaatttgaacctagcgtagaaactgaagcaatatatatcgagtgatgggacaaccgaaaattactgctggaaatcgaatatacatctccaaacgacaaatgtgagcctctgccttttgatctaacaaagctggagttaaacagatggctgcctataaatgtagaccgatctcaaaatggaataggctatatcgaggtcgcagggccagtcggcaattccttttacagagaggctctgcagaattgtgcagcagagatgagtagagtctagaccgtgccatctcccatcattactcgcatggggctgagtatagtgtgaacatatagaaaaacgtgacctacgtaagtttatgtacaaatcccacttttgtgcagccggaataggaaatacttggcaaaattagactacatatagaagtgataggatcaggatatgtgaccagtttttatttttttttttcatttggtcatatgcgagttgccaaagtccagccacgaggaagcgattagttgctgaggccactatggtggctaaacttcctatgaagttataaaaatgataactagcctctggaagtaactacatatatgcaattaatagcgatgtactgccgtttgatatcaggcagatatagcgaataataaagtggattttagattgctgtttgtatgggttcatcttggacggtgatatatactttccccggatagaataataatgtaagagcgttgtgtgctttcgatccgattcttatggcttcccatttgcaaacaagcttatattcgaatgatgcttaagtgcggttaagaaaatgtgccgcaatttcctcgcaagtcagcttcattgcttaatccacaagtcggggcgacccttacaacccgcccggtcccacaaggttatgaggagaagagacacataagatcgaggaactcctgtcgggcacgaacctcccgaaaaacaagagatttaaaccttttcgggggtcaatgttgcctgtccaatgatacctcgggcggtggcggttgcagaatacgaagtgcgcatttttaagattggctagtgctttgtgagcaatcagacagatgagtggcgttgttgtcgcctaacatatcgtcttagagcgggcatatctccgaaggagatgggtaccttgcataaacagggaaataaaagggaaagaaaagtcaaatgtaacgtgggagttttgggggccgtgggttggaacgtgtaagtaatgtttcgtaccctggccagagttacatcacaacttgagttcgctagggcgtcaaactaacagaactaaaagacgaagtgagacagcaatcttaaatgctgcaaccgaatcaacggtgatccggcttcatcccggatcgacgcatatgattggcgtgcctgatagggaggtggctccatattctggcccccaagggtttagcgcagggtaattaacttttaactccgtcggttctgatcgccttgcttggttttgggaaagttgcgagatgatttgacctcacaccctctgcttctactcttaccctcacttacgctcttactcttcgaaagatgcaaacactcgcttgtcaaacgaatgtaaacggatcttcttacctccactttcccgccttcctgcatctccatgtggtccgactttcgggtagtgccctgcatcccactacgtacaatcgccagtggaccccgaggcgtccgtgccctggtgcctaacttacggatgtgattggattttatatatcaaactaacagtcttggcaccagtcatgaccctcatgctagtgacgctagagtccgttagggtctgttagcctctttcatgcggctcttgcaatttcatttcgccgggataaccccgaataggcatagggtttgcacatacccctctccaacgaaggcctaccatggctgatggctgatctagtttttgtttggaatgcgactctcttacgccactggctatgtggccatgttatgccacgggtttggcttgtgaccagccggtccatgccgcgttcacgtcaagttggcatgcattctgcgtatcctgttagcctttgggtctagtgttcacactatcaagcattgtttccactcgacgagtctgtgttgggtgaccctgcgccggtggggtgcctccggtgaggcactgacctatgaatcgtggaatcatccggatatcacgcacttgctcatttccacgttttggtagctctgttctcttttctgattagtgcgctcaatgtcggaggtcggcatcttccccagggggcggacatggacagtccccagcaggcgctcgttatatttcagtttcttttccccagcggacattctctttcgaccgtcaacactctcatttcgagctctttgggatacttcccaagcagatatttgtctgcgtcccctcgttgtccgcgagataacctgccattcattttcgggttattaagcggtttctgttgcatataatcattgcatataatcattacattcattttagccatgatgttcaagtcttttgccgccgtgtcggccttgtcactctttgcatcgtctgctgttgctctcgatgccagtctgaagaataatgttgctgtctactatggacaaggtttcaaccaaccccggctctcacatttctgtgaacagaccacgtcggacattatcaacattggctttatcgatcagttccccaaatttgtgggtgacttccctggttccaattttgccaatcagtgtgatggcaactttttccccggtacagagctgcttaatggctgccaccagatctggcaagatatccctatttgcaaagctgctggcaagacaatcctgttgtccatcggtggtggtaccgctacagcccagtctcttccggatgaggccactgcgacctggtttgcggatttcctgtggtattcattcggtccttacaatccatccatctcttcattgggttggaccgaggacttggttggcatcttccctcgcccattcctcacttcctcggttgatggattcgactttgatatcgagtacaacggcggagttggtatgtttccctgaccctctaccttctgactatactttccctaacactcatataggatacgccacactaattaatcgtctacgctcgcatttcgaaaccagcggagagacctactacatctccggagctccccagtgccccattcccgaccctcagctcggcgatgctattaccaactcgtactttgatttcatctgggttcagtggtacaacacccagggttgctctgctgcggattgggtgcacaagaccggcaagttcaacttcgacgactgggtcggtgtcattgagaagagtgtcaatcccaatgctaagctcttcatcggactgcccgcatcggaggatgccgctaatgctggattctacttgacccctgatgaggtgcagccccttgtcgagacttacatggacaagcaccctgatcacttcggtggtatcatgctgtgggaggccaccgctggtgagaataatctcatcaacggaacaacattcactgagcacattaaggatatcctgtacggttgcgctcctcctcctcctcccccgacttcgactgtcacccccatcccttcctcgactgtgactcctgtttcgtcgtccactgtcccgccgtctagctcggctacgccttcggtcacctcggttgcttccagctcagtcgcttcttccagctcggttgtgtcttctagctcagttgtgtcttccacctccgccgcctcttctagctcagttgcgtcttccacgtcggttgcctcatctagctccgctaccccttcggccacctcagttgcttccagctcagtcgcttcttccagctcagtcgcttcttccagctcggttgcctcatctagctcagttgcatcttccacatcggttgtgtcttccacatcggttgcctcatctagctcagttgcttccagctcagttgcttcttccagttcagttgcttccagctcagttgcatcttccagttcggttgcatcttccacatcggttgcctcatctagctcagttgcatcttccacatcggttgtgtcttccacatcggttgcctcatctagctcagttgcttccagctcagttgcttcttccagttcagttgcttccagctcagttgcatcttccagttcggttgcatcttccacatcggttgcctcatctagctcagttgcatcttccacatcggttgtgtcttccacatcggttgcctcatctagctcagttgcttccagctcagttgcttcttccagttcagttgcttccagctcagttgcatcttccagttcggttgcatcttccacatcggttgcctcatctagctcagttgcatcttccacatcggttgtgtcttccacatcggttgcctcatctagctccgctaccccttcggccacctcagttgcttccagctcagtcgcttcttccagctcagttgcatcttccagttcggttgcatcttccacatcggttgcgtcttccagctcagttgcttccagctcagtcgcttcttccagctcagttgcttcttccagttcggtcgcttcttccagctcggtgtcttccaccacccctgctacctctgagcagtcttcctccacttcgagcctccctagcagctctgtgacgactactcctgcttcatccggacatcccgccccccactcctccgccaccggaaagccccacagctcgcatgctggccatggccatggacatggacatggccaccacacccacacccacccccatccccacactgtcccaagctccactcccctgatcccgggacacccttcaagcaccgctcccatctcttctgcgaccgagtctagcgcctcttccactagcgaaggtgtcatcccgaccggtgtatcatctaccagcgacgagaccactgggagctccaagcctaccagcattgagactaccggtgcttccaagcctaccggtgacaacactaccggtggttctagctctactggcgtcgagaccactgggagctccaagcctaccagcattgagactaccggtgcttccaagcctaccggtgacaacactaccggtggttctagctctactggcgtcgagaccactgggagctccaagcctaccagcattgagactaccggtgcttccaagcctaccggtgacaacactaccggtggttctagctctactggcgtcgagactactgggggctccaagcctaccggtgacaacactactggtggttctagctctactagcgtcgagactaccggaggctccaagcctactggcaacaacttcactggaggatccaagcctaccggtactgactcaaccacagccccggctggtatcaccgccactgcctctgtgactgcctcgccttcctccttggctcccggtacgaccacaactatcatcgtgacctcgtacgttgatatttgcccaactggattcactaccatcaccaccactattaccaaaacctactgtcctggtgatgtctccgctaccgctaccccaactggcaccgcggagatcactgctcctacttctgggcctgccacttccactccttacattcccgaaggctggaccactactgtgactgtttgcacccagtgtgccgctaccccgactaccgttaccctcactaagcccgctgctactactaccactgaggttgtgtcgcagcccaccgccccttcggtgcctgaggaatacactaccaccgtgactttctgcaagcactgtggtcctactggtagcaccgtcaccattaccatcccggctcctactgttactgctactgccaccgcaactgccaccgcaactgctactagcattgttcctggctctggctctggctctggctctggctctggctctggctcttctggaaacggtgagggctccggctccggctctagctctggctctactggtgaggttacagtgcccggtgtcgcccctgtgtcgccatcttcttcctccaagcccatccccagtcatggagcaggaggcttccacgtcggcaagccgtcctcgagcatagccttccgcccctcgcccgcgcgcactgccgtgcctgccgtgcctaccgtcgcgaccaccgccacgaacacacccgcattgcccaccaaccaagagggcgtgtctccggtgtacaccggtgcagcctcgcgttccaacatgaccggcttgttcggtggcgtcctcgccatcgctctttccatgttcatgatgctgtaaagctgcccacttgcccggacagcatgatctcatcatgcgatatgattgatctcacgaatgctgatttcaagacaaactggtactttctagcgactggttgcttttggttcattacgatgtttataatattcttgttcatccgatctccagtctctggagtgattcgatacctcctggcctctttttgtgatttactctggccagtagcggtgagaccatcgtgttcttcgcattgaagtttgcgagcggtcgagtccgtttcaattccctaatgatatccttttcaagtgtggccatctagcctgacttctctcatttttatttcctgtttccatatttacaacggacaacgatgctctttgtataaaaatactacccatttgcatataatgcagtgaagagaatattatcaattattttctggcagttaaaatcctgtaatgacagctttccatctcaataatattcatcatgtcgatgatcgtccaatagctgtgacaattcccccgcattccgacatccacggacctcggctgcggagaagtaataaatggcaacctcacttttgaacttcgattgttccttcaaaatacataaaatgctaccattgaaaggaatcaaagtcatcgagctagcaggcctagctccaggtacgcaatcaatccaagaaacatcaccatcacaactaacatcccaccccaggcccattcgcaggcctcctgctagctgactacggcgcctcagtcctccgtatagaccgacccaactcgacaagcgttgaccaattaacccgcgaccaactaacccgcaacaaaacctccataacgctcgacttacgcaaccaaaactccctaaacatcctcctccgcctcctcccaaccgccgatatcctaatcgaccccttccggccaggcgtcctcgaacgcctcggcctctccccaacagaagtcctccaaaaacacaatccccgcctaatcgtcgcgcgaatgaccggcttccgccgcgacggaaaatacaaagacatggccggccacgacataaactacatcgccgtctcgggagtgctgtcgacgctcggccgcgcaggcgagaagccccacgccccaggcaacatcctcggcgacttcgccggcggcggcgcagtctgtttccagggaatcttgctcacgctcatctcgcgctcgcataccggccgtggccaggtcgtcgaggcgaatatggtcgacggctcggcgtaccttgctacgttcccgcggttggcgaggaagactcccgcgtgggcgcagccgcgtggcgagaacctgctcgatggtgggtgtccgtattatgatacgtacgagactaaggatgccgggcggtattttgctgttggggcgttggagccgcagttttatgcggcgttggtgcgtgggcttgggtttgagattggggagcttccggagagggaggatcggacgcagtggcctgtcttaagggagatttttacgaggaggtttaaggagaagactcgcgtggagtgggaggctgtttttgatggtacggatgcttgtgctacgcctgttttggagcaggcggagcttgaggagggtggctatgagcagcggcctatggtgcatctggttagtacgcctggcaaacccatttcggcggacaatggtgggtggtcgggcggcgggcttttgcctggggatgggggcgttgacacgcttagggagtgggcggggtgggagcagggtaaggattttgaggttaggaaggatggggcttttgtggcgatggatgggaaatccaagatttgaggcggtgcatcatatgttcgagataatttagactatataactgggtctaacgaggtagatatatacttcagttcccctttcccgagatcaacacatcgcaggcattgaacttcataaatgccaaagccaagtcccaaaaaccatgcattatcattaccattaccaccaaatgcaaacaccagtctagatctatagaccatagacaagaacagcatgtacagaaacaagaacaagagccaatacgggcgacaaagcagtgccgccaatagcagcgacaccaccattactcttctgactatcactcttcttcgcgccaacggcactactagaagttgtggcatgagccccactaaaagccggctcgggctccgatacggagttataatattcgcgaatgatatcgctcgcctgttcagcgacaccatatgtcgaggacatcaggtgcgtggacaaggcaatggggatgacgctggcatccgcaacgcgcacgttagcaagaccgtacacgcgcagattggcgtcgacgacaccgccctgcttctccggcagcatcgcgcaagatgaggacgggtggaactctgtgccggcttccttgcgtagccatgctatccagtcgtcgtcgctctggacggttgagcctggggaggtctcgtttgtgaggcttccgctcattgggctggtttcgccgatttggcgggcgagtttgatacctgcgagcaggatctcggagtctgggtattgttagtgttggggacttggtttgcatgttagatggggtacataccagctgggttattcagatagttcgggtcgattacagggtagtccattgggtctgaggagttgatgtagatacggccgtggctgaatgggtgttggagggcagctgtgatgccgatatcaccgtttccatcgctgttcatgaacaggagctcgatttgacctgtcgggcctttgaagatgtttgatgtcgtgttgcagattgctttgtagccggtgaccacgccgtcgtcgtaagtagtgttcggtgaatactggtcgattgagtcgaggaatttcgagtcatattcgttgactttactgccgtacatagcggtcgaattcacataggcaacggcagaatcaatgtatgtgaggaatttggggttgttctgcgcgaattagcatctggccttgtttgatcgagtatatacaggacgcaccctatctttgccgccgtcgtaaaagatagaacctgcggtgtccacattcgagctccatttcaccgtagcactctgtaactcggtcagtaatgctcttcttatatataggaagcacactcacaaaatggtcttgaaggtgttggccgacaccaggaagttcagatacgaggtcaacaccagccgcagagaggacgtccttcgggccgacaccgctgtagagtaatacagccgggctgccgacagaaccacccgctaggatgacttccttgttaaccttgaccttcagtttcgttgctccgccatcagtcgtgtactcaacagcactcgctgttttgtcggaagaagtagaattgtcgaaaacaagccgagtcacatgcgcattcgccaatacatcgtagttatcccggtctggaagcggatcgagatacccagaacgactgtaggagcgcgtccaattcgaagggttgatgcatgaggttgagacgtccgcgcccaggttctcacctccgtacatattggcagaaatacctatccccatgttcgctagtgacgttaaccagtagcccacttcggggaatgtgctaggaatgttagccttatcgatcaattccagagaacaggattcagcatactagtccgggtatgatgtatggatcggcccgccggtgccatgatttgatgcattccagacgattccagcctcttgaactacatcatccaccgggggagagaaagtctcgctttttttcatagcagcgtagaatgagtcccacgaccagttatcggctccgtccatatcaccgagcatgtctttccaagcattgatttcgtcttcacccggacgggtcatgtatagtccattgatggcggagctgcctatatcatatctccgtgtcaatcttatgttgcttattctttgggatatcaagcttgtacatacctccaaggaccttcccacgaggccactcaatctcacggtcgtctgcattagtctgcgcaacagtgtaaaagtcccaattcaaaggagtcgtccataatgaatcgaaataagcatatgccggtgtatctgtacgagcattagaaatcgcaaaccccgcggggtcataattaaacgcacctatgcgcttccgataatcatctccattcccgcccgactcaagaacgagtacggtatggttcttatcctccgaaagacgagcgcccaacacgagtccagcttgacctcctcccacaatcacaaagtcataagaatcgtcgatttccgtgcgcggcgataatgcgttcgcgaagtggcttgcgactaggctggcgcctacgatctgagtagcggatagaccagtccgcattgtaagagtggacgcagattgtcgagagtgggtgaaagggtgtatctcatatataaattgccgatcagattgaccagggttaaggctgtggagaaaaacccttgaaaatcttgttatgagcttgggaattcccgtttatcaagtttacgcgcaagatcatcccagataagcacattctgaagcctcaatcgcgttagacaggcgggtcaatattggggttctacaaatgagatcttggttccgctttctccacatggccttttccaatgagtcaactttattttcgaggtacccgtcctggttccatgtttagtatcgctgttcctggatgaggtcgaattggtggctgttggtcgatatgacggtcaacccgatatccccaaatactcaatgtcgcatcaccgacaacacatcagtgctgtgatggcacggctggagatatggttgctatgcatcaaccgcggatccagagccaataatggcctagaattatctccactaacaaagaacacattgacggtgggtctcataacatattctcataggctgacagttagatgatcgcaattataatccatccagtagccagccacgataaaggtgtgtatccagaaggttagaacaaagccccgtcatagtgtctggatttccatggacatgagatgaaacatcaatgacgaaacagggaccgatcgatctgatcccaaattgcatgtttcccattggcagtgatcaagtaacatttattcaacatgatctcaaacagtggaggttcttagggttacgcttgtcagctgcaatttatttactttccgctaatccaatctgagtctggccctgtgactagccacgtcgctaaagttcgacgattttacgatcagcttcttggttcgatccattttgaagagactattgattttgagtagaaatgtggaaagtcacactccgtatgtagtaacattggttgtacaaaaatttttaacccctgaattcattattccacggttatatgatccatggataaagccaaatgaataatcgttctgtccttggattacctcgcagatagattctttcaatcacttgactgtaagggtcctgtgcccctgtaatagcatttatgccagtattttggtggtgtttgtccagctatcgcggctaacttgatagactacaatagacgatctcccttctttgcccagttgaaaaaaggaaaaaccagtgatcgtcagtaagaacacccaaacggtgctatccgattgtcattaggacttccggttggcctggacattgccatacgtgttgaaagttgtgaaaagatgagatttgaacggaaaggctgctggttgaagtggaagtcgaaaagtaaagtgcattggtcgaagcccaaatggggaataaaactttgtataagtatgaggcgtagtacaaagagcatctcatcactatgtctttttagtaattttcttatctctatttttagatctcttcgtagatctcttctcgtttagcagcaaagcttcaattcgaaatacgctagttaatggagagaagaagtaaaagcaatatcatgaaaaaagtaaacatgtagcaattacgtttcatcacacaggcatagtcccaggggtggttgcaaatgcctcttccaatatctccaaacctctaagcagctggtcctcagtgatagtgattggcggggcgatgcgaaaggcacccccaaagctaggatggctactgagattggcccacaagcctaactcataagcccgatccccaatcgccttacccaaagccagcgcagggttcttggtctgacggtcctcaacaatctcaacccctgccataagtccgcgcccacggacatctccgatacagccgtacttgtccttcagtacatttagccgctcatggagtaccttccccatagcacgagagtgctcaaccagcctatcacgcaccacaatctcaagaactttatcgcccacagcagtaggcagtggatcattaacatgggtcgtgtagaagcagaagtcccgctcgacgcacacgcgctcgatctcagcactcgtaacgacagcgctgagcggcaggccattccctagcgtcttgctaagggtgaggatatcaggaacgacttcctcgtggttgatagcaacaagatcgccgcaccggccgattcccgtctgcgcttcgtcgacgatcaaaagcattccacgcttctcgcactcccgctttagagccttgaggtaccccggtggtaggacatgcatgccagccgacgactggatacactccacgatacaagccgccagcgatccgcacgattgcatatcgatcatgcgccagccgtattccatctcggcttgccagtcgtaggatccgtcggcgttgcgaaagatggagcggtatgcgttgggcggtgggagcatcagcattcccggcatcaggggaccttgacctctgcgaccgaagtggtattgtgtgcccagtgcttgcgcggtcacgccatgccaactaccgcctagtccgacgatctcgaactttccggtgtataccttagccatctttatcgctgcttcgttgctctcgccgccggtggagaggaagaaggctttgtcgaggccgggtggcagcaggtcgcagagacgttcgcctaggctgatcactggaggtgataccattcctgagaagaggtggtctagggaggctgcgtggtcggtgattgtctgtacgatttctgggtgcccgtggccgagcaggcaggacatttggccggatgtgaagtccaacactttctgtccggaggctgtgtacacgtagagccctctgctgccacagatcacgtctttgttgaatttggttccatagttgaggaggtactttgctgctttggcttgaagttcttgttgattgacatcattatacaagataggattatcagtcttcgcgggcctgattgtgactgtggactcttctgtggtgattccaggggccatgacggggatatactactgacaagtatgacgattctgacgattctgagtacttatctctttttgaggactcacggcctctttaagtttcttgttcccctcattgatgagttagggtactttctcctctttcgtcttatcttagccgcggagccgcggccaacaggtgtcctcgggcatcacaaagttctcgtatctaatgaagagacattaagttgctaggaactaaagcgaaacctattgataacgaagccaggttcaagcaatagctgggtttactgccgaatacctttactctagtatattccttactccggacttcatcaatttgccacttttatacaaaaatatggtaaatcgaagcttcattttcccgtaatctgctgtttttgaatgatggcatgtaaaatattctctgagaaggtcaagtgactttgggctcacattgacactccaacggatgtccttgagccgccttttgttgacctggaaccttgaaacaatcttttaatttatgatactcggccgcaagtgtattggatcatccaatattaatgactggaattacaggtattgtagaacatcgttaaacgacctatagatacaagaacatgccttcaatatgcattaccatcaccactctcaccactctcaccatacctcaaatcattcagtcctgatacctattggcctcgataggaatagcacagccagcaggtgcacgtagattgacgtagtcagctatccacggaccctcccctctaccgtcccaccatttcatttaggaccaccagcaggtccacagttgtattgcagttttctgtcagagtctccaacatactgctgaacaccatgattagcaacattgatccctcgtccggtaacgctgccaacttgatttgggttgggcgcgtatacaatagcttcgccacgatctataatagtggtgccacctccacaggcacaagaattgacttctttcacgttggctgtgaaaaccgtgacggcctggtagaaaagaacacagatgtctccacgttcagcggaaacaccattgcaggtgaccgtgttcgagactgaataagtctgggaatcggagacactaaatccaacagaatcaaataggttgctgacgcccagtagttcactagtcgttctgtatcaacaaaggtactatccatgcggttcttagcatagacatagtttagtatcatcggattcatggcttagcggtattcgagaccaattagggctagcgtagcgctaagaggctctcccaaatcccggttcatagatcgaaaaagctcagctgccccacaaggagtttctagttggcaatacatggacccctctttcactatgtaatgcaaggccgtggagatgctaccataatccatatcctatatatctcaaacctataaaaagtactatatctaaattgactgaccatggtagtattttgctcacttgaaagcgttaatcgagtttaacatcctaaagaaccatcaccggaaaatcaccggaaactgctatcttaggcctagcttaagttaagcaacggaatgccgtcggtaccctgtggacctccacggcttggcctccaagatggtcaacgtcgccccgcaacacgagtagcttgttaccccgtagccataccctagtctgacaaaagtccctgatcgggcacatctgatgtactactggccagtctgaatatttgatctctgggtcctcggagaatatgcatattatcaatctcatttccaaattgtggcatgagcaccgaactggtcctaaagtcgaatggcgacaactttggtctgagactcattaggaaaatggcgctttggacgtgaatatgtgttcttgctcccaccttttgagagggtattagcacacttcatttatttcctaccatggtctctacgacgaggagcatatcattgaatcaagacgagttggtccttgaggaatttatttttactatcctactaaatttagccttgggaatgactatatgtacccccccccccggtggcctgcctgaaatttcagtaccaccttccagaatgggtgcgatcatgggatcataatagggaaggaagtcaatactactaaatttaatacactctgaggaaactttgacattactggcaatcatttgacttccatttcgaagttacgtggcatgaaacggaaagtttcaactcacatgccatagaaagaacaatagaatcgacagtaaacgggttcaaaattctatgcgtcaacatgtgtccatatcataatatatttacccgaaagggccatcgagaagcagccattgttgtttgttctttatcggtaacaattgcacaggaatcttcgagattcaggaattcatagcttcagcagacaaattagaatcacttcgcagatccttttcatcatcgaaaaggcaaatccaagacgaagcttgatccagtagcagcaaagccgacaatagcaatagagctgtgaatcatagcgattcgtcttgtatgtgcagtccattgacatcacccaaggcttcagcttaggtatagcaacgccagcgacacggttctcgtcatcgtatttgaatatccattctccacctcccaggagctccacagccgtagatagtgtaacgactagcaagggattcagcaagaaccaacaagagctcggtgcatacgcaccaagttcctgttgcacatgatcgcgcgcgcggagaatgctgctttgacatttgcatcgatatatctttgcaggaccaccaaatcccttggagatatgaagaagggttctgaaggaagatggagaggacaaaacgagtgtattgtcggggtcatatgctgggcacatgaccacgcatccaacacagccccactataaattcgatgattcttgttcgttgatgcagctcatctgttgcagaaatctctccaggagtggcattttgtgtcgagccgtgggcttgttgccgcaggacttccatgttggagacatggacaaaatcgtgatcgtatatatgggcgagaacatatgaagaatgaagatagttgggagtttaaatatacgacaacgaatctcctccgatgagaaagaaatcatacatgaggcgtagaaagagctgtttcatctgcaagttgttgaacgctgtgaccagtcgaaccccgatcatcgactgcgtgggaacctggcgaaccgtctttgctcaaatgaattttgtaatcttcttcccagatttcaatgatggtagtaaagataatgactggcagtcgaaccgacaaaagaatggagtggagggttaatggaagatgaacgaccgtgtagatggtagaggttggaaggagatgttgtgcagagataaatagtgcgttggtgaactttgcgcgtagcaaggaattgaggcgacggcgagctcacgttgagagcattgaaagcattgaaagtgttgaaagcgtcaatgatgagctagctctcgacggtaaccttcttttcaggtgctgatgcttgcaaagatctatcaagtgccatccaatatatcgtagtaattaaagaaaggaaaaagaaataaaaagattgcttttgacatcagccagaggatgtgcttataagaggataggataagggagatgagaaataactccccagagctaacattataaagcaaagacggggacaagagaatgaagaaggaagtgagcgaaggaaaagagtcagaattaaatacaaagaagacaaacaaaatgagaacctcaggacgtaattggtgcccgaggcaaccgtacatagaaagatatatgtcgctctcttgcttttaccctcaaaatgctaatctcgaatatattcagtaggatatctatattaaaacattctaacggccccagaaggccttttggagcgcatcacacatcagagtgatacacctcttgccctcagacaatgccccatccatagccaagaacggatgtggcatacccggcatgacctgcaagtcgacaggtacaccggccttctgcaacttctccgcatactgctcgccttccgagcgcagcacatccagctcgccaaccataaccagcgcaggcggcaattgcgagtaatctccatcccagaacagtgggctcgattctgggtgggtgcggtccgcgtcgttggggacatagtggtcgcggtaccagtacatcttaagtgcggggagtgcgggggtccattcgtatcgacgatatgactcgttgttctctactgtggcagtgttgtctgtcacgggaaccgagagcagctgagcgaggaagtgaacaggcggtgacagagtcagtgccttgtgcgtgataatcacggcaaggtttccgcccgcggaggagccgccggttgcgagtttggatacgtccactgggagtgcggcggggccgtcggcaatcaaccagaggaagacttcccaacagtcatggactgcggccggccaacggttttcgggtgcaagactaggagaaagaatataaattaggccgaaatttctcaaggttatgtatgcatggcgtgattaggtagcttaccggtagtccactgtaatcacgacgcagttgcctcgtacacagagattcgagcacaccacattttccgtgtcgatgttacccagcacccagccaccaccgtggaaatacaacatcaccggccatccaccaggaggcgcttcgcccttgggagtaaagcagcggatgggcactggtgggccctcggtagctcgccgctgaacagtaatgtcttgagtcttgccaacctccagcataggacctgcaccaggaatcaagacaccacttgtccgtgacgcttccacgggccgaaggtgcacttgctggttattgatgacatgctcgttatagaatgcgacatactccgggtgcaacaagtctttgacagactcgtggagcgggtaaggtggttcagtaatgccggcagtcattttggcagttatttagaaaaataaaacacaaagatcgtcggcattcagtgtctttgaggtgttcaaatagggacttggaaagtgcacccccacgcgcagagtggggagaacaatgcggggacacgctgataagctgataagccgattgcattccgctttgggaaaggatcaacggcctatcgcggtgggccagtgccatctcagggacaactgcccgccgtctcttttatttagtatcgagtgcaacctgcatgtatccactgcgcccctcttaacgtccataacgggccacttcatgttcctcggatcggtcttatcggccactacggagccacttgttacgttttaatctcggctaacgtgggatgtagctgtagctccggatgttgccccccgttgataaaaggacctcccacgcgcaagggggggcaacttcctacttctttccatcttttctcaattgactcacccctaactcatactcccttcacctctcacagactttcacaatgtcctccaagaccgccgtccttaccgacaaggcccccaagcccctccccgggatctactcccaggccatcgtcgccaatggcgtcgtctactgctccggcgctgtccccatggacgccgtcactggcaagctgattgatggcgatatcaaggctcacactgtaagatccaacaatatcaattgacctaattcaacctgctaacaccctattctctaacagcaccaatgcattaagaacctgacccacatcctcgaagaggccggcaccgacatcaccaaggtggtcaaggtcaatgtgttcctatccaacatggatgatttcgccgaaatgaactccgtgtacatgcaatactggggtgatgtgaagccctgccggacgtgagttcttaccccgctcctgaatcccttgcgttggagtcatttggagtcatgctttgcccctccatttttgtactctgcgtgatgcttgcgcttgcgcatacagctgtgcgactctgtatgttttatggtttgatttgttgctaaagtatatactttgcaggtgtgttgcggtcaagacgctccctctcaacactgatgtcgagattgagtgcattgctgtgctataaattagttctggcttttattggaatcaatagacaaaattcgaaaatgattatatgactactaccgcagaccacctttcatactattgcagtaactttgcaaaccaactcggatgaaagccaagaccttgacagaccgccgattatcaccgcttttccattaaaggcagtctgtgtacttaccccgcgatgcctgatgtattttctctttgtacaaaacctgcaactctactttcctatttcagcttaaaacccgtcgctaccataaatatgatatattaagcaaagagtacgacctagcaacgatgagccaatcacccgatattttcactcaagaaattcagcggctgagagctgattacgaggagaaaaaagaccggtccaacctgggtttcggtggtgaccgacagataatcgacctcagtttggaaactgttgatggtgtgttctgctacacgtattggtatgagggccagtgtatccggctaggtgatatacctggcaccatctctggcgatatccttcgcctagaccaaaacttgcccgtttcagttgacaatggcgactatgaaattattggtgaccaaatacgtccgctcaagaatgtaccaccactcccagagcacgatgatgactccgaggaacttgatacgattcttgccttgctgccaatagttgaagtcgattccaacaagcattttgtcaaggaaggcaaatacaagagtgagatcaagaatctgcttaaatgccaaggtggatcctgcccaggggtgccgaaatcatcccacatcatccaattactgggaaggtcgccagatggggagctggtgtttgagaaatttaaacctcgctacgtcttggcgaatatttatcctctcgccacctacaaagactggattctacagataatctccgggctaaggatgctccattcacttgggatcatccatcgtgatctccgcatcgacaatatcgtcttctcctctgacatgtctcgcctgcttatttgtgatctcgagagtcgttggggaaatcgcctagcacccgaggtttctcgcgagccggtgttagattctggctggactgagaagtcggatatctatgaccttggttatctcatcaaaggcatgatatacgggaacgtcccgtttacgaacgcggtggaatggcatgtccccgcccctctagctgccgttgtggaggcttgcactcgaaataggcccgagggacgcccaggtttgtatgaacttcatgctatggttgatgggatcgagataagtacttgacgatatcatgaatatgagacctcgggacatctgtcacattgataggcatatacccatgatgtatctgaacgtatatgattttattttcaaaagcaaacagtgagagggatggagttgaaggaactgtttggaatggtgaataaaaacgttccaagggaggtgtgtcctcgcccccctgcaggtgtatgtgggaaaatcacctaggcagtcataatttcctatattccctttattccagattatttacatacatgttcattcttcccttgtaattttcataattaaagagacaaagaaaggacgggcttattgggcaaatcctcattaaacggtgcataatgtgcggtgggtgtattaggaaaaacagtctagtctgatataactttgtacaatgcctgaagccaattgccatgatagcgattttgcaatctatgcaattttccaaaatttctaaagtcggtgtttatcagacaaaaatcggggtgggggttacagtgggggtatggtgggtctgaagtgtgaatagcttcaaaatgatccccaaggggaaataaaaaaaaaggccgcagaggttcttcaatagcagttagccggacattttcctcattggcataggatgcgcctcgctcagtgtatgagacaccaaagagtagggcgctgagccatgggagttggaggttataatgtctgggttgacctttccattgataatcgctttagctattgtttcttcctcagatagaaacccaggaacaacccgtgccttccaatagttgtagccaactgagctttggggctacctgaggagaatatcaggcaagaccgcatagttcagaccacatagttcctatatgtagggaaaatcccctctcctgactccattttctgggatataaccctaaacgatcgaaaagcagtcagtgataggtcagttatctctttgggcctcttgtggtatagcatttgatgtttgactgactcgatggatacttcggtaaacattcagtattgttatatataacgactgagttcattaagccgactatagttcataaaattctgagcgaatatcaaacccgaactctccataatagacaatctctgtccaagacttaattggggaattatatgacgggtgcctttcggtggatttgtcatttgtgtataaaaacaccgcgcattggggttatggctaggatgagcagtttatcagaagcgcattccacaacgtgaaactatcagaaacacttcattcaggtgcctgtcaaatccgtcagattgtccatgaatccaggttcgtctggtccttactggcaaggtcaacccctctgatcacgtgccgtgcacagattcggaacattgggagcagacgaagcgataaccgtttaccacagaattgaaagtaggaaaacagagattctttttgaaagtgtgcaagcttgattccagtattcaaataacttgttgcaattgttggtggtcggagttgttgaccacgtcatcgagggatccagggcacgatcgacttcatcctactttcacctccaaggacaacccttcgatgcacggagaatcattacaatgaattcttagaagatcgaaatttcttcaaatcttccattctcagggactgaaacgaactgacatctgtacagacaaatccacagggatacggctactaacagtcaaaccctcaatacatccctggcactagcaagtcctcagcattccaagctatcaagctaagatggaataccctttaaagagagggtcatgctcaatgccttggattctttcgacacacgcccctcggctgctacattccacccctccacgctatattcgcgtcgacgcgctccagggctaagaacccttcattaaagtactctttagcccttcaacactcctctgggtaccaaccttatgtatatgctatcatttgcatccaattgatgaacttggagtgcgactacaactgggttcgatttgtacacggggcattcaacacgcctgtccgttacctactacacactcacattcttacctacccggcttccgagcaggcagtttaagagggcgacagacagtcgttcttctcttgatcctctcgagatatcgcaatcatggcttctggattttcacctacaccacgaaaggagggaacatggacgaagcttgtgatatttattgcgctatacttgctactcctcgagtctatattggaatgcgtgctcgtgctctacctttacggtaatggcctggttgactcgaaaatgactctgagtgttgtacttgcacttgtcgcagtatgtttggcttgaatctttggctattatatcgtctcgctgactcttattcagtcttttctctcggtaccgcttgtcagccttcaaagcctggttgcttggcaatacaacaacattggtggatttggaacccagaagactattctgcataatgtatgcacatacgtgctgcgcttggatcttatgctttggctagctacaagtatagctggtctagtggtcgctgcacaacaggtgtactgtcttccggaagggacagacggatccttctggaaagttggtaaaagctgtgccttccaccgagcatctgtgattgtggctgtgatttcaatgtatgcagcatcctcgttccttggcttctttacttgaactgacaatcctacagggtcactgtgtgcactatgtactgtgcaagggagctttgcgatcgaccatatgatgtatcacttcttggtatctacaagcgccagaaggttctcagagacggcagtatcgtctccggcaatagctgggatagtgaggaaacgctcaagaacgagattctctatctttgccgccaacacgatggaactggagccggggagttctggtctgcggacccaatcgccaacagagtcatctgccatcccagcgtccggcatcctgctcccgtccgtctgcggcctcaactccgagtcaacactgaatccggttcaacatatggagaaattatgtctggaacgacgatttcgccagaggacactcaacatcggatctcacccggatcacaaagcgtggctagcgagttctatcccatctcgagcacatctactactatgttgagtacgcagacaaccaacgagttacgcgctcttctctctgatgcgtttgcccccaaactaccggccattccccaggaacacaccagccataagagaggaaagtcatcactctcttctatcagacgtcttcttccaaagtctttcccattgtctcttccactatcagaggatcctcaaatccaagccctcgcagaccccaacaccgcatcagacgtcgagaaacaggttgtgacaccaaatagcatgcctaagggtatccctcaatcgacaacctaccaactcgtcgcaaacggcaacactccaaacgcctcttcagcatccctcccgcaaagccctgccaacacccagcccaaattcaacctagcacaggaaggccacacccgaacgatgacaatgaactccgccgacgccccagaagtagtcccaacaaccccgtcctccccaccaaaagtgcgccgctcccaaacagcatacgccataccggaaacgcgctcaatccaccacccacaccacccaaactacatcccacgccccccttctcaaccacaaccacgagcatactcccagtcccgccgacaagctcccggtccaaaaattcacccagactcaagacgcaggaccatgcgaccccaacagaacatcatccactatccctcccgcagctcatcctaccacttcgacccaaactacgtcccacgccactcgcagagccagtacaacccccactccaacccccacgctagcagcaccagccagtacggacaccagtcatcgcgctgggccaaccagcgccgctacggctcatcagcccggtccatgccggcgccgatcccccgccgcagcgacgtcgaaataatctaccccagcacgcgtcgcccgcgcagcagtctcccttccggcgcgagtggtccgctcagctgtatcttggagacgactgaccccaatgcgtccggggataatcacaggcctgtctcggctgcttactctgagttgccgtcgaattccattgatcagacgaaataccggggtgcgaatcggacgagtttgggcttctattgagggggtctttggatggtgaagttggaaagagtattaatcgttgtttgtctgcgggtcggacattcttagttctattggtttactttgtaatgttgtatgatttgtatcagtggatagagatagatagtatgcccagatgtagcagggtgacttggttacttccctacttttagtgttgtagttagctttttgataccaaattgaatttgttatacaatagaaagacgaatattcaaacataattaaggagcgaagatacaaagatcagtacaaaaattgatttcgcactcgaaagcagcaagatgcaaaatccgcctcaaggcgacagcagaacacaccgcaaagacatgcaatttcagatcccaaattccattccaggaagtacaccagaccgctagaaaatgaatcaagagaaaaacaatgcaatccccaacctgatatggtacataaacacaaaattaaacaaacccatctaagccctagtctcggtgcttttagacttctgcttctgagcatacttgtagcgataagcctggccgctcttggcttccacatcacggtctcggtcacgacgacggctctctttgccgtgactctcagccaaagaccccggaccccgacccagctcattctcgccccagctcatcatcaaagccttggccatgcgatctcgctccttgaggaggaggtcgatgcgccgctcccactcgcgctcgcgcttgtccacagacagagcgatgcgctggtccatcgcggcggcggtttcgtcctttccggcgatgatgtcttccaggcggcggagctctattttgaagctcttgcgtaggtggttttcggaggttgcagatgaggcgcggagagttgcaagttccgagcgtaaatcggcttcgcgttgctcggcggctacgaggaggttgcggattttgcgcattgactcggcgtgcgaggcgcgcagtgttgagacggctgttgagtgtgcggtgtgcaggctgcggagttggctttggtggtttgcctctagggctgcggtgtccggtcctcttggctctgggttgagagcttcgcgcgctgttgggggtgaagggggtggactaggaggttcgacgaccctgtcttcttgcaagcgggcgatggtctcgagggattcagcatgctgttcttgcgactggagtagattgtgctgggacttggttagggctgttgtgagctcgcttactcggttggagagtcgcgagttctcggtttcgatggttttgatgagggtctgagcttcagtcgcctgatcacgcagacgagctgcttcggtatctgcagctttctgggcggcggataactcccggagttcttgctgaaggcttgcaatgcttggcatgtctggctgttgcggttgctgcacgccttgggtgtccacgaacttgtccttcaatggcgagtgaagtggggatgtgggatcccctgggcccaaatctttgatcagatcgagaatctcgctgtaggtgctgtggccactgacaggcagatctgcagcagcagctttgagagcactctcctgggcttccatatgggtttgaacacggctgagattttcttccagtgtgatgttcttttcctctagaggtcgacttctaacttccaggtcgatatagcgttcctcgagaacctggaaatcattatgcgcacgctctaattccgactcgagcttctcattctccagtccataatcatcgatctgtgcttggagttgatcaatctccgagttcttctcctgtatttgtgcatccttagcccgtgtgacttccttgagcttagtgaatgtctcatctagagtttcatcgcgctttcgcacctgctcttgggaaatattgagttgctggcgcaggtgagcaattgtctccaatcgctccttgtccaaaggagtctgtgcgtctctgttttggagttgctgttgcatctcacgaatctggttcaaaagaggattgagatccgttgtgttcatgctggactggcgtaatagcttttcatgttcctcattcttcttttgaagcgactggacttgctcgcgtagcattgcctcgttgctacttttggcattcatctcgtccaagagagcattcttctgctgcaattctgtctggagatgacggatctgctcactagcagaaacagcctcgagaatacgactgcgatttttcagcaattgattgtcgcattcattcatggcgtgttccatacgtgcgatctgctggtgaagatcctcattctgctcctctggtgcatgactggaggcgtccgacaattttcggacggaaggggatgcagaatcctgggcctcgtcatcgtcggggtattcttcaataccttccagatgggttgaatctttgcggatagcgctagtccggtgcaacaagtgtgaaggagtcgacatatccactggcggtccgaattcactgtactccccagagtcggcttcgtcttcgatgaccggttgcttcgatttccggaaagatcgtcgtactgatccgtagtctacttcagcttcgtcctcctcctcttcgtggtttgctccatcctcatcgcccatcaggtatttctccatattcgcagtaaagtcctcggggcctccaacgtcggataatttatctacatcttgatggaaagggggtagagtttcgtcgttcccatccataggaaaatggccgctcgggaagttgctgaaatccaaggtgtaatcggcaagacgcgcatcgagatctgagcctgtcgggcttccaggagaggcggggcgagagcgatgttgcatttcattatcggaatggtatccatagtcacgagcctggtcacgaccgtggtcgctacgtttcgctgcgacgcgctcggttgaaggagtctgggcggttgcaggagtttgggcgggggacggagatctcaatgggctggaaggatgctggggaggagaggatggcatgaagagaggcgtcaccaatgttgactgtccaatggtgtcatgcgaggttggaaatggcgaggtatagcctgtgttggccatggttgcgcacgcgtgcggatgcgcaaagaggagggcaaccggcaacgataagctctgccaatttagaggtcaaatacaatccgccgggttgcactagagacctccaaaaagaatattaaccgagtaaatagagaaataacaataaccacattgcggggagaaaaggggagactgaagaatctcgcgacggtttgtattggggcgcctgaggcagcaatgtttatctgcctttttaggtctagcggacatttgtactcctttacttctctgttcatgtttattcattcttttctgaaagggaacttatactttgtataatcgtagatcatatatgtccgcctactgacgggtacatatacccatggatggataactatacgtacacaatatggtacatgttgatgattgtaagatgatcctatgatctacctcaagctaggggggtctggtcacctgactaagccacgttgcagttaactggacactcacgtgcagactttatgcaggcaaaaccacattgaaaacgctattcatcacatctaatcttgacaacagttgaaattcaagtatagcatatttgtccgaaatgctagatattcattgtgcttcattggcgtccctgatctagcatatcttggaacaaagcattgagactgctcgccatcggccctgccgacattaactggcgagctgccacgacaagatctttcatacccatggtcaatgtcatctccgcagcccactgccacggttccgccatgcccccaggcagagcattgtaatactcccaacccataacgccaccaaagttgggaaactgctcaatcaacattgccagaacaggtcccatcctctcctgagacacataaccctgcgatccattacccgggtttgtcaacaggccgtatacaatccgtcgcggagaccacccctgggcaaccatagtagcgtacatccgtggatcctcagcaagaccccagccattgtagaactgggtattgtaccagctgatctgagaagcacgagcctgctcgagttcacggtagtcgaaccctgataagttcccaataccaagtaatgcagctgccacaggggccagggtaatgatgaatgcgtcgcccaggtcagccttgagccggtcgatgagtcggacgatgccttgcaaagacatggcctcttccacatcgagatcaattccatcaaggccatggcggcgaatcatggtcaggaaaggataataaaattcttcaaattccatccggctgccgtcaagccgcgtgaaggtgcccggggcggccccgcctaacatgcccatcactttcacgccttgccgctgcacgactggcacttcggcccatagggggtcgaatttggggttgtctggtggatcatcgttgagagtgatgtcccctggtgcagcgttcaagtgaaaagcggcgagaataacatgtgttattccggtgttgttttcgaggagcgggagcatggagacatactgacccccgcctgggatgagtgtttggtggtacaagatcacccgcggacgctcgccgagtccacctcggatcggtggcattttgaagagagcaagatattgaatacccagctatgtgtaatttgtaggaaattattccatggacttcgctttgtgggagctgacgacaagcttgagctttggcggttggtagctgtggggggttcgggatcctccaagctcctagcgtccgagagaaacgaccacagagaagtaaatcattaatgaactccagatctatgcaatggcaaattttaaatcatgtataggatcagccggggaatatcgctgcaacacaaagtagtagatcgggctgaacacctgcgcacgataaacccaaatactcactgactaagctgaatggtagatccatttttgggtaaggctaccacctgggcagcgcttacaagggactatggctattgatttgggataaagtaggctaagtacttatataatttgaattgtatgggacttctagggcatccacttcacacgggcctggattaccgcctcaatactagaaccatggacactgatccctatatccatggcgttgaactcggctcattgggaagagctgaagaatgacatcaaattttgattccggattagtcctccagcaaattgaaacgaacaaccaggaacatagtgtatctcaatgtggacttcccagacatacacgaatgacatgtatccatctcacgagagatagaaaatgaaccagtatatttcaaagggaatgtcgtatagacaagccataatcgccttcgatgagctgatggaggcaaactagtcgtctctagagactacataagttgcaggccatgcccaccgagccttgtggcgaagcaatatcttcttgcggggcagcatatacttctaagttctggtatcaacttcaacactcaatatcatgatggcttttaccatcagtactcggatcatgtcacgtccgcttcttaggctgctgccatccgcacagtctgtcaatgttggattgtggcatcgttgcagtgtcgccacagcatccaatcatccacaccatcctaaccctgggaacttttcgaatcgtcctaaacaagagctttcagaaataggccacaagggtgggaaaaaaggcgggaaagctaccggcgtgggtgggttccataatatggattcagagaaacaggtgagtgccacaacatcgatcaggaaaaagatctttcgttaattgtataatgcgagtaaacagcacgctatcgcttcaaagggcggtcatgctggcggtcatgctggcagtcgtgctggcggccgtgctggcgctcggggaaaggcagtaggcaatggggaaactgagttagaagccgaacagcacggccggtcgcatgagccttcggtagttgcacctggatttgaagaatggaagacaacggcttgagtttcgattaatctgatttaagaaacaatttcatacaaatggacgatcctatgtttaatacaagaggtgccaaagctgcaaggtgcaatgacagacatcattgtatagcaataaggagcaactttctgaaacataaacgaatgtcaaaaaccaaaagagaaacaaccaaccaaccaagctcgctacgtccgcgcgacgaagattagcatatcgagcgaatcagatgacgtcttcaatcctctgtagctgcaggcaaccggctggtcatcttctgactgtggagggaccccacgtccgatttgcggctcgccagaaattgggcccttgatgaagtctgcggtgccatactccgctgggattggctgttgcgcaatctccagtgggggatgcttccacttcgcgatccaagcatcccaagattcggaatttagctcctaaagcttggtgctacataagtccgggtctctaaagaccatgatcgcgcctccaagttgaaaattttcaattgcgtgcgtcagcgagtccgtggtataaaagctaggacaaaattctttgtccgcattgtggctatgcctttgaggaataaataaagccagtgttggctccaatgtatcgagacttgaagctgattgtcaatagaggtgagtggtgtatctgctgatattgaagctgatattgaagctgaggttgaagctgatgctgagcttaatgacggtatttcggtgagtaatgagagagtctgggggatggtggtttcggagccattttgcgaaatgcacgtatcagatacgtggaagaagagaagtgatcaaccaaaacgtgatgatgaatgtgtcagatcgatggaagatgaagatctagctactgcgtgaagctctttaataaatttatacgaataaagctacagagatcttatcctctagaatctagaaaaaagatctctgcaggcggaataaagagtctgccaacacggcaatctgcctgcgagaggagagagaaggagagaaagagaaaccaaatagaggtctgcagactgcatagggaaacagtgaaagggcccaaatgtatcatatataccctacgataatcaaatactatgaatgttctgaaacagggaactacatatgtaatcgtacacaccagcaggagcgatctacacagtacatcggtacatacgtgagttttggggttcggttaaccaactgccatgaatcaacgttcataaatatatctatgcagtctcttaaaggcctagagaggtcccctactcagggattgttagcggttattctaaaaaaccccagaaagacctcaaaaaagacggatggaaagatgataacaaagtggtgtgcatttaggactttctctacggaatttacgagcgatttggatgttataggtattttagagtagggcatatgtcgagtttatgaatatgtgctttaaatagagaactactgcacgtgagcgttactagcctcagatttcacctagattataagtactaccaatgtaattaaagtaagtaactttgatttctggtcaggcaataacatcaattgtactatttatacaattcatctatacaattcacggggagttgattttcaatagcaaccaatacgattgccgctctggtccctggatacgtcatcaccctaggaaatcaccaagacaaccttccacccttcaccatctccattgtttccattgtttccatttagcatgaagtaatcttcactcttgacatttggtcatattgcctttcataatggcctccctacggcgtattgctgtggccacgagctcgacgatcatccgactgaccagcttcatatttctacgatgggtataaggtccccataggttaaccttgtgtttcagaaaactcacgcgtttacagatccctggccatcactttgtgcctctcgtggttacctctctcgtggtgtacctgtcgtcaataatctccttgctcaaggatacccagcctcacgaaagccaaacgactaaagctcgagactcgaatagtcaggctccacttccgaatgatcagaatctgagatactaacatgcttcacagggcataactccgtgtctagccgtgccaaagatggcgattctgtgcttaaaacactattgacagggctgccctctccaaagtggcccctgctgaccaggatcacaattataatcaatgtagccctggcggtcctgacacttgacttcttgacccgtggtattctactttattctaccacaaatgttgcattctcacgtattggatatgtctccccgaccactgccaacttggtctttcgcgagcggnnnnnnnnnnnnnnnnnnnnnnnnnnnnnnnnnnnnnnnnnnnnnnnnnnnnnnnnnnnnnnnnnnnnnnnnnnnnnnnnnnnnnnnnnnnnnnnnnnnnnnnnnnnnnnnnnnnnnnnnnnnnnnnnnnnnnnnnnnnnnngggcccccctaccagtggcggtcatgttccaggaggtctctgacctaagccaggactggtatgaagagggcatcgtttacaagctggatgactccaccgacttcactacaactgtgaccctgaccgacctgaagccggcgacacagtatcgctactcgctgtccaacaacaagtctggcacatttaccacggcaccattgcccgaaacttccgaatcaagccgactatcatttgtaacatcaagttgtctgaagccaaacttcccttacaacctactatcgcatccactacgggtcccgggcctcgagcaaatgaccgacgccctcgccaaactgcccaagctattccgtccatcattcatgctcttcctaggcgacttcatctacatagatgttccctggcgctttggctcaacaatgtcacactaccgtagcgagtacagacgtatctactcatccccctcctggacccacggaccagaagacaaccgcgccattgacctcccctggctgcataccctggatgaccacgagatcgaaaacgactggtcgcaaggcaacataaccgccccgtatcccgcagcagcagaccccttcatccactaccacgtgcgagcaaacccacccattcccgcagcacccttcgccgacccagacaacgtaacctacttcgccttcacccacggcccagcctcattcttcatgctagacacacgtacctaccgcaccgagccctcttacaagaactcaaccattctcggccaatcccagctccaatctctcctcgcgtacatctcgaccccagagccagccggcacacactggaaaatcatctcctccagcgtccccttcactaagaactggcacgtcggcaccacagatacatggggcgggttcctggacgagcgccgcaccgtcttcgaagcaatgtggcgcgcagagcgcgatctaggcatccgcatcgtcatgcttagcggtgacagacatgaattcggggctactaggttcccagacccggaacttaaactcggtccagatcagctgttgcctaacacggccgggctgggactgcatgagttcagcgttggcccattgagcatgttttacctccccatccgtacataccaccagacagactccgaggatgttatggtgaagtacgcgccgaatgggaatagtaagttcgggcttattgatatcgcggacgaggttgaagatgttggtttgaccgctgctgcgcctgttcgcgctcgcagctcggttctgacgtactcgttgtatgtggatggggaagttgtttggaagtatcgtcttagtgtcccattagaccgcgacgtgagtgtccatcgcccgtctctgccgccgggccgtgtggttgaggatgacattccggatctgagttggagtgtggtgcttgggactgttgtgggacgggtgccggtattggctaagcgggttgttgagacggttaatggtctttactatcaacttgcagatcgactagagaagatggagagacttgattagttcattagactagactgtttctcaaaggaagcgcctcgcttgctcggtcggatctgttcaaggcgagttgaaccaagctggtagtctcgaataatatagtagtaaaattagcgctagttcaatctaaacaatttccttttttaagcaatcatcaaatgaattagatgcccggcaagcccggagtgagatgggctgcgttgtatctcgttacatagctatgtggttatgaaggagggttttatacacggtttgcactgcagaacaggggactgctaaaccaaaaacttgacgccgtttgactttgccccctggatccgttcactggggtataagatgtagacaaaagggatgagaggagagtggagaccgaagaccaatgacgcatgcgataggggaaatgcttcttgccaatatggaagattcaagatatcgattgtcgcgaccagtaaagtaagaggaatagagaaatgaaagaaaatcggagacttcttcacgaataattaattgggtcggtagtggcgatatagtggctccaaatggaaggcgaagacaaagacctcatggctcgacggcgtcgattagaagagtccaccgctggaacggccgtgaccacctcttgtcgtcacctcgtcttcgttgcctccagcaattccgcccagcagactggcgccccagatgccggcgataccccacatgccaatacgccagccgcggtacaggccctgaataccctggccttgctgtcgcttcttctgtgaggtacgctggccgaggagctgcttggcgcgctccttctcggacggtttcgagctgacaccttcttcataaacgacatgccacatcgtgccaatgataccgcggtaagtccgcggggtagggacaatggtttccacatcggacgcatcaatagatgctgtactgatgctaccgcctgagtacttttggcgcagactcaaggatgtgtatgtagcgatctgggcgcgtcggagcacggtctcgagtgggaatcgcacggcgagttcaagtcctgagacaaggaaggcacacatgttccatgcgttaggatttaggagagggtcaatggacagatacgatttgaggaagagtggtgtcgaggtcataatgagggtaggaagacttgaatgaagcaccgtgattgggacgagatgcgaagggatcgtgcagttgggcgtggggagctggcggatagctcggacaagggaccttggcccatgggttgctggcgtgagcatcaggaatgtacgagcggtgtcgatgggagctaggatcagggcggatagcgaggttgaaatgaatgacaccaccagggttgccagaggggatgatgccgtcagaatgtccgctgtcatcgacatggaaatgtcctcttctggcaagccagcgattgccgatagaagactacggatgaaggtgttcaaggtgggcaggagaagtgagtaaatgaatgtagagttggaggacttccagagggaggttggcccgctggaggaccagagctgggataaaacttcggtcaaggagttcgagttcttgagagtcaagacatgtttagactgtgcggcagactctggtcgaatataaccactacggtcggtgatgtggtggtgtgatttacgagatcgaggtgtactcgggctcggcgttggaggggcagctgaggtgaagtaactggtttcatcatcggatgtttctgagtcctatacacaaatctgtcagtcatttaaagccatatattagctttagataacagcctccttactgaatcataagagcttccttcagtacccggcatcgagttccgatcccactgctcctctgcggcgtctggtacgacatacacctgcaggatggttttggcgacgtcgaacggctgtgcagtaagaaccttggtgtagcgaacaagcgctcggttcaatgcatcgcgggcccagtcagacaccgagggtgaagcttccagataatcggcatagtccaagtccggcatgaactcacgcgctgtgctgccaaacacctgggctgacgacggcgatgccacttcagcaggcgcatttgaagcgggcgataagccagacggggggatatagtaaggccgcaagggattgatcccttcacgagacgccataatgtgatgatgatcggagataaaggtggttcggggaaagaagaacgggaggagtggaatgtccgaacgcccaagctttgtcagtccttttttttcctccgcggccattggacggtcatcgctcgctcttccattttcgcccggatgctctttttttctctgttggctttcaaaatccccttttaatttatttattccctcttctacaacatggctttctggcgagaagttggtcagcagttgcgccgtgtacctaagaccggggatatctgtttgactcaatcgcggagatccctaagttattcaaggtcatggaggaacaccggaatcacaacacccagtcgctcgcaaaccaatgcacagagatcccttcaatcaccttggaaaggatataatacagcccggcgtgccttctcagtgactgcacaagctgcgcatggtcatatcacgccgcccaagcccggcgaagagtacgcccaccagatcgcagttcttgcgctgttgtactatttctgactgactctgtaggatcaacttgactttcatcgataaggatggcaccaaggtcgacctccaagttgccgagggggataacctactcgatatcgcacaggcaaatgaccttgaaatggaaggtgagttgagccgatataatgcttatttgaccccaaattgctgactttatcccgggaataggtgcatgcggaggatcatgtgcctgctcaacttgccatgtgattgtggatgacccggaaacctttgataaaatggaagaaccatcggacgacgagaacgacatgttggacctggctttcgggcttaccgagacctcccggctggggtgccaggtgattatgaccaaggatcttgacggaatggttgtgcgattgccgtccatgacacggaatctccaagcaagcgactttgagtcgaaataaagacactagcagagaccccgggagggactgtttttgatctggaaaaccctcacatattatccgaatagccagatggttacagcgggggtttgtggtcctattcgtcctatttggacgccgaataggactttgtactgtaatattcgtccgatgcatctggtggacttgcgcggtatcgcaaaatgaaaatctcctgtactatttttatcaaacaagactctctacataagcaatgtagacaaaatatataacaaaaaaatatcttccaacgccagaaatatgccatgggtaatcgtagatccagctcacgcctcttcgatattcaaaggctttcccttctttccattgatcaattcaaggaatccttgcttgctgacctcgttggcagccttctcccgctctcccataccaattgtgcccttcttgcgctcatccttggccgcctcctctccgcggacttgagccgcgcgcacagcattgaacagcttcacgacaccacgctgcgccatcttgcgcacccgcttctcctcctcagcgacgggaccggcaattcctcgctggatacccatcacatcacggacgcggccgcgatccatttcctctttcttctcggcgcgcattttagcccgcgcggcgttgtcgagcttctcatctgcagcctcgttgaccaacttcgcagcatacgagcttcgcgagagaacgggatcagcccgtgcggaggtaggaagtttcgtggatagaattttggagatggaggttgagaatgcggtagggtcgttgcgcttagggacagctcggccgcgattggcgcctgtgggtttgccggccggagacgagtcggaaagatcatctgcatcagaatcagacgcgtcgctttcatcgtcgtcattctcaaggtcttcgtcgtccagctcaatctcctcgccgatattggagtctgagtcgctatcgtctgattttttcggttccggtgtgggtgcttcttcttgtgtctttgccttcttcatgcggatatcgagagccgagggcttggctactgtgacacctccctcttcggcgtctgagtcttcaagactgacggggttgaaattgccatcttcttcttcgtcctcggagctgctgtgatagaagcgctgcttgacgaacttcttcttgcgaccagtgttgccctttaggccatcaaggaccttgcgttttttggaaacagcaggaggcattgtcacagaaaaatattgcgataaatgcaagcaaagaagaaagtcaagacgctgatccaaaagtgcccgtatcacaactttttttgggggcggtgagaaaccatcggctctccgattggcccctccacattgcctctctggtctctcaacgggcttcatcctcacccctccaccatcgcgaaatcattgacgactacggtcttagtctaatttattttctaattgtttacctacgcacatattcaccatggttcttcaagaccttgggcggcgaatcaactccgctgtcaatgacctgacgaggtccagtaacctcgatgagaaggtatgctatgtgtccagtgtggcccataagccagcccgctaatataacaacaggccttcgatgacatgctcaaagaaatttgcgccgctcttctttccgccgatgtcaacgtccgtctcgttggaaccctacgcaaatcgatcaaggctagcgtaaacttcgcatcgctcccagccgcagtgaacaagaagcgactgatccagaagaccgtcttcgacgagctcgtaaaattggtggacccgcgtgcagactccttccggccgaagaagggtcgctccaatgtgatcatgttcgtcggtttgcagggtgcgggtaagacaacaacgtgtacaaagctggctcggcactaccagacgcgaggattcaaaacagcgctggtttgcgcagataccttccgtgccggtgcttttgatcagctgaaacagaacgctaccaaggccaagatcccatactatggtagtctgacgcagacggatcctgctgtcgtggccgcggagggtgtggccaagtttaagaaagagcgtttcgatatcatcattgtcgataccagtggtcgccaccgacaagaggaggagctcttcacggaaatgacacaaattcagaatgctgtaacaccagatcagactattctcgtgctcgacagcacaattggtcaatctgccgaggctcagtccgctgcgttcaaggcaacggcagactttggagctattattattaccaagactgacggtcatgccgccggtggtggtgccatttccgctgtcgccgcgacgcacactcctattatcttccttggtactggtgagcacatgatggacctagagcgattcgagccccgcgcgtttgttcagaagctactaggcatgggcgatgtcgccgggctggtcgagcatgtacaggccatgacaaaggattccgcgggtgccaaggagacatacaagcacattgcggaaggtatctacactctgcgcgacttccgggagaacatcacctcaatcatgaagatgggcccgctgtctaaattgtccggcatgattcccggtctgtctaacatgacccagggtctggatgacgaggacggctcactgaagctgcgccgcatggtctacatcttcgacagcatgactgtagccgagctggatggcgacggcaagaacttcgtcgagcagcctagccgcatggtccgcatcgcgcacggcagcggaaccagcgtccgtgaagttgaggacgtgctctcccagcaccgcatgatggccggcatggccaagcgtgttggcggccagaagaagcagatgcaacaagctcagaacatgatgaagggcggaaacaagaaccagcagatggctgccatgcagaagcgcatggcgtcgatgggcggtgccggcggcggtggcatgcccggtatgcccgatatggccaagatgatgcagatgatgggaggtggcggtggcggcatgccggatatgcagagcctaatgagccaaatgggcgggttgatgggtggaatgggaggaggtggtggtggacgtggaagaggacgttaagcccgggctttgctaatcttcttgtttcatccctgcgtttttctttctcctttccatatcccaccgctggctcatcaacttagcatttgggctggtgtttggcgttttcttgctacttcgcattatatgcaacccttgtatacgagaacaaatttggtaatgagcctatcactatcacatataccatcctgaaaaaggaatcatgtccccttcttgttctaccacaattacacttttgaaacggaagtttgcagtgcggtactatcgttgtattcataataaaatcacgttgtacacataatcctgaaacagaaacgccgctaaaatccatccgtctaataagattagagaattgatacgaaaacaaagggaccgccagatcaaccatggccatgttcatggcggccaggagatcatgcaccaggcgagcccagtgagatcgaatgagaatcaacatgttatgcttttgtgttgggggatagcaaataaatcgagtcatataaatatagatgaagcccagatcgcttccccatgagaggtaggtcgagaaagacaggaaggatatgaaacaagtccgtatggtacatggagcgcccgggagaggatggggggtatgggtatcaaaagtgtccttgtagggaggaccggaaaaaaacacaaaggaaacccggacgcatgaaatccataacaaggattgcttatttttcggcgaagcgacggtcgaagtatcggagcacacccatgacgcttgcagcctcaacttccagggcagcgcggctgccagggggagcgatttcgcggggatcggggagggtgtggagcttcggcagccaggttgagatttcgtcggtggcgcgggagaagttcgggtgacgggagagggtggtaaaggcgtcagcacagctgagtgttagctctgatggcggagcgggcttgggtgcaggaggttgcgaaggcatgggggcgttgttacgcggcttgggcgcggtggcgggggcatttctcgacatgcagcatccaccgtcctttcctccgcctccgcagcagcctcctcccgatggagtgccgctcgctgaccgggaggctgccaacgtcttgcaaaaaagagtgcttcgggggtcggactggcactgggcgcaggtgcctggaccgttggcacaggaattagtcgcttggctgataggtgggagggtcacttctgagcggacgtctccctcggatggtggcggggtgaattgggagatggattgaatcggtgcgagacgattggtctcaaatgtattgatgttgcgtacacgttgctgctcctgtgcggccatttcggcgcagatgcagggagtgccgtcttggcagaacccacagggatcaacgggaggcgaagaaacatcgttgtcgtgagactgggttggaacgctagaaaactgagcggtaaagtcgatttccatctcttccggatcgggcttgatgtggggatccctatgatctcgttccgggctgccaacgccatgaggtgagtgtctagaacgagacgactcatgggtatcaatttgcatgccaaatgcatcttcaatgcactggcagtgggcgttggagcagttgttgcaccccggaggtaaactcatctggctatcttccttgttgcgttcggtacttgtaggctgaacatcctccattcgggagcttttggtcttacgaggtggcaagggaacagagtccggaacgggcgcaggcttgctgacactagggccagcgaaagatgaccggaactccttgacaagggtttcctttgcgctgcgctcgatcgatacttccttctctaaggcgtgacaccggtcgcgccaccatcccatctcttcacggcattgatcaatctcaccagagaggtttccaatttgctgttggagcgaggcgacttggatctcgtggctatcttcaatttctttcatttgctcttccagttcactaacacgggcggcccggcgctcacggaacgctcgttgagctgctcggttctgagctttgcgtttggttggcggtgtatctgtagctggcttgcgaccaggcttgggacgtggtgggattacccattctcgcgaggtgatggagccgggggtacccgggcctggagatggggctacagagggcctggcggctagcgtgggcgccggtgcgagggccagtgcagaaaccccagctggagcaggtgccatagacacactggccatcttgacaccaaattgagcttcaaatactgtttggaggtcagttgtgggcaactaatcgggcgtagtcggggcacacgcacgagccgtttctcggtcggaagagcggaagtgcgctcataagagccgataagcgaaaatgactagttggagagaaagaacgaggttcctttcaaactctgttctgtatgagataatcagactggggatggacgcatggacactcaaagagtatagaaaggttaaagagaagagagagatgcgaagggagggggaggaagccgagaaaaagcggccgatgatcagattagattatgtgctcacatgatgccggtttcggacattgagctttcggttgttatagaagttccgttcttccaaggttggctcttctttttctttttctgctgatttaccattggtctatttactatttcgctaaacctaatcctgtaaggagctcctcttttgaaatttttatctgatccgaatctgagtggagatggttccgagcaagcgttggtgggctgacgcaacatattctactgtatggagtaatataatctcttattttcttcgctaactgcgtgtaattgtttcatagacgcagctcgagcaccaattgcttgaactagaaccagcaaaggacagttgcaatggcaaaatcccgtcccaacttccaactctgcacttcataacgtactgacttcctatgcagctcaccgttctcccgcctgatcttcgatgactcaatgacaggcgacacggatcaaaattctccagtcaaagtaaaatttgttcgagtggagcgtctcgtcaatccattgaccatgggtgggcgagacgccccctacttccggttctaccagccctgtagccacttagcactacctagtagcaacggccatcgggccaatgagaacgtgccaatgcacaagggaactttcccacgagtcatccatcagcggtgagagtatggaagagtatggatcgacatgggaattggaacccgttcagccgccgttctcggtctctctgatcttatctgattgcactaacgccgctctagggtcaaccgcaatccaagggttggagtgaatatcggcaaacttatccctctttcactgccgtatctttttccctctctggatgattggttcggccttctgtggaagtggttggtggtcttggcccttgcaaatgcccccccacatagcagaatcttatcaatcagtgaacgatgctcgccaacctcattccgagcgagggccgaacagcggaactttcgtgtacatcgcccgatctggagaataccgccgccagttagtcacagctagagctgcttgtgacgtgcgtatgcagagattgacggtgggaaaagtggaatgtgtggaaagaaatcgccgccattggacacgcccagtctcggcggaaaattcaatccactattctcagttatatctttccagtgtacataaaccgacttaatgacgcagtctagtgatattctagcaaacaccagggacttccaatttgctcttgatctgctgagatgaattccaataaggattctagctaaagctaatcaatgccgggcttgttgttcgtcttcggggctctcaatctgcaagggacatgagctctacgttgatatctagaatatgtttcggttatctagtatttgattcataaaataccaatactttctggggagtcaaagaagtgagaacagaaatcacctttcctttgacgagatcaggttgaccatttgccactgaacgtttctgaggggcgggtctagtatagttatatacgtctgagcggaaattaacacagggctcattccaaattgagagctattctctccaagacattcatcaacatcgatgtaacaagcattcacaactgcgttaatcgaggagttccctctgctggaggagcagagtactgggtctccacaaagaccttctgcatgcctatctcccgcttattgaaactcgcatacaatttttccatgtcttccaaatggacacggtgggtcaccatatctagcggattgatctggtttgtctcgatgagatgcatgaggtgcttccaatacttttgaacaggagcttgtccattacccataaggtgaacacctgtctgcatcagagccccaatgttaaagtgattggtctgggagtgattgttagatacttcactcttccgaaaaccggtgaactcacaaatgcgctatagacacctgtcaccccaacatgaccgaacgggcgaacggcagtgatcatttcattcaacatctccgaagtgtccgtctccaacccaagcctctgctcgaagtaatgcgcccatcctttggcatattcacccgatgcacactctaaagcaacatcgggtccgccctcgaccatctttttcagctgtgatgtcaccgactcacctttcggtaggtcactgaagatgatcgtctcgatcctcggttctttagtcttcacgaagtccaatcgccatgcaccgtcacctccatcgataaggatgactcgactagctccatggaagaagctatactgtgcgcacatctgcccaatcggtccggctccccagatcgcaacaacatctcctttcttcacacccgtgtcgaccacacagttccatgatgttgccataacatctgaaacataaagtgccttctcatctggtacatctgctggaatttgaagcaaattgacgtcgccgtacggaactcgaacatactcggcctggccacctgcaaacccacctgtgaaatgggaatagccaaacatgcctttttccaatttagtatcaatatctggaccctcagggccgggtgaaaggtcagatgcacatcggccactctgctcaacttacctgcagttcgcttcccatacaaggcattggccagagcattctcgttggttcgttcacatacagaataatactctttccgacaattcctgcaagtcccacaggcaatcggaaaagcaacaacaactctttctccgactttgacgttctttgcctctggccctacactttccacaattccacagcattcatggccgagcacgtcgcccttctgcatctcgggaatgacccctttgtccggcacatttgtgtcagtctacccggtcgctcggatgatcgtgagattattttcataccgtgatacaggtgcagatcgctaccgcaaatagtggtgcctgtgatcctgacaataacgtctccagggtcgatcacacgcggcttcggcattttcactaatcagtggtcagcaatgtacaaaagcctaacgccggcaatcgcctccctcgcttaccaactttgacttggttcttcccttgccaagtagtagcctggatcatctctcctgtctccattccatgttcattggcgtagttagacacgtcagtggtgattgtcgcattattaccacgtgggagtttcttttccagtaggtttgctgcctgggacatcgccattttcaatatattcgatgatacgtgtggttgggatatagcgagtttatgctttcactgtccatggggttcaataggaacttccggcttggttttaactactagattgcagtatatgtaaaaatgacgaaacttcctggtttgggggtttctgtcaactgacatcaccatgatgcggcatgccaggtgcagagtccatacatatgttatctatacgtacgggattttccctggcgtgtggggctttccgcttttatgagggtcagtaagaccaagctcttgggaaacatctccgcgtacgtacatagcagggcattgcttattctctgatccgaactatgtattggcaaggtcttactagcttctacttctactttacatagtcatttacgaaataaggcctctctatgtaatgtgataagtcattgggcaacatatgcagtctcagaatgataccaatgctcctaggatatattgccgcttaatggtagtgttgattttctcggacgcaaaatctcttcattggctacggacaacgaggagttgctgcagccaaaggcacataaccttgagggctccaattatcccgttgcttaccagcgtctgcgttttggttgaggtgcggcatctctttgttacgacccagagcggaccatgctaacccagatcaggaacccgtcaaagagaggattctgagcaagaatatacaaactactctgggctcgttccctcgtaagctgcattcagaggggacagacaaaacataatggctttttgcggccggccaaagtattgctgcgccgcaacaaatacaacctttccattggtcagcgtcagttgcaaaggcgatgttcaatattctcgtcggaaccaatcttccaaagtatctctgatcttcaaagactatgctgtcccaacaaatcagatgaaatgggctttcaatttgtcagagatacttaataatctacaactactcggctcaggcgggcgctttgctggaccgaaaatctcaaaagaagaagagtcgggatacgtgtgtagtgacagtttcagttctatatatatggacggcaatatcatgcggctactcgacaggtattttccccgttcactcaccaccgccgtgtcttatcctatagtctggatctatacagaaaatagcatcgatcacaacagggtgacaacaaggttctttcatcatcgcagacagctgccagaccgaataggccaagatcaatgtcggaggctccgtgaattgccgtaataactactcgggtcgcagtaattgtcaaataaaggtagggagtcctggccatggttattgtgcataacccgaagagtctctgcgatttgtccatccaactctcgttttcggaagatcgtgggttttcttttcgataagcggaggacatagaccggtactggtatcttgcattcatgggcggtttggtagtcataatcggtgttgtttagatcgaccacaaaagaggagtgcttgccggggtagattgtgaccgcagggaaacgagtcgtattattcctattgtattgatggaggccgtcctgcgcctcgctggcaaatggacgtatagattctaaataattgttcggatcaagaatactattaggagtatcacccagtattcgcatcgttcctggaacaacgtctgggggcaagtcgaacaagatctctcaaatttggcccatcgcgtggctgcgaatatgttgagttgagtcgtccatagcaaggaagaggattgatggtatgtgacaataagtggatgttgctggcctccctgtgcatatgtgaaaagatgaagtctccattgaatgtgaaggtgaagtctatcattgcttgttgagcgaaaggattaatgttcttccgtctttcccctagcaggagcatgaaggttggtcgtctcagcgactgcgagcccctacaacatgcataaggagtcagacttactagaactaatctggtagcaaatggcgtcataggacttgatttcagtgtatgcgatttgtaggaactaagcatttagctaactacggtgtagattgttgcgacgatattaacaagtatcctctcacctgcatataagtactatttgacctgtaagaaaagaacatgtagttgttgtggacagctgaatccgttatcaccggactcggcgataacccccgggggccccgtgaacggatcaggtaccagcccccgtcgggactccgccttttcccctcacgagtcattctctcctccaactcttcctcttccctacactcatacaatctactacatttacaacatgaccaggaagtacagctcgacccaaggcctcgatatgccatgggcttcacaaatgtccgcccagctgcccagtccggtcatttctgtacctgcagcacagccagtccgagctcaggaaccgatcgccgatgaacctgtccgacccgaggattactccaagccctactgcgagttcatgacatccaatcccacgatatttcacgccgttaaatccttctccaatcagctcgaagagcatggctacaagcacctctccgaacgagcggtgtggacatcggagctgaaacgaggcggcaagttctacacttcccgcaacggcagctctttgatcgctttcaacattggctccaaatatgagagcggtaacggcgtggctatcgttgctggccacgtcgatgctttgactgccaaactgaagcccgtgtccaagctaccgaacaaagcaggcttccagcagctcggcgttgccccgtacgccggtggcctcggtaatacttggtgggatcgtgatcttggtattggtggtcgcgtgctcgttcgcgatccgaagactggcaaggtggagaataagctggtcaaacttgactggcctattgcccgtgtgcctaccctcgctccccatttcggaacacctgcgaatggcccgttcaaccaggaaacccaaatggtgcctgtcatcggaattgataactctgatttgtttgaagactcgaagattgagtccagcgacatcaagttcgggacgtttacctcgacccagcctgagaagcttgtgaagatcatctccaaggagcttggcatcacagactacagcactattgtcaactgggaattggaattgtttgatactcagcccgcccaactaggaggtctggagaaggacatgatcttcgccggtcgcattgacgacaagctctgctgctatgctgcacaggaagccctcattgcttcctccgacagcacatcgaccggaaccgtgaagatggttggtatgttcgacgatgaagagattggcagtctgctccgacagggtgctcggtcgaactttatgagcagcgtcattgaacggattaccgaggccttcgcgaaggacaactacggccccaacctcctttctcagacagtggccaacagcttcttggtgtcatcagatgtcattcacgcagtgaacccgaacttcctcaatgtctacctggaaaaccacgcgccccgccttaacgttggcgtgacagtgtctgccgactctaacggacacatgactaccgacagcgttagtgagggcctcattagacgagttgccgagcgctgtgggtcaaccctgcaggtcttccagattcgcaatgactctcgcagcggtggcactattgggcccatgaccagtgcccagatcggcatgagggcgattgactgcggtattccgcagctgagcatgcacagtatccgggcgactactggcagcttggaccccggtctgggtgtcaaattgttcaagggattcttcgactactacgaagaagtcgataaggagttcgccgacttttaaattggtaattccgtgctttgctttagacagttagagccttttctcctttgtgcatccctattccaggcgtatcgtcacgttattctatgctttgggtgtgtgtattagactacaagaagtggcttcattctgtgactatatgtattgcttttccaactcttagcaataagttatctttttgattcgattgctgtacctcaacgaactatatatccaaagaatttccaaacatacatttcacattactatatttttaaaatgacataagaaaaaaaatgagtgtcccacgggtgtatccccatggggtaaatcatggcccgacaactgccaggctcaaagagcgtggtgcaacgttgacgaggaccaaaaaacaaatctgacgggtatatcacatcatactccaagccaccaatgtgactgcatgagccattcaaaaaccaaatacgtgtctataaatcagaccttcaaaacggcaccgccaaatccgcaggcaaaggacgaggatgcgtcagcgtattgggccgactcagaggccgaggagccgagataatccctgtcaatttcttatcttcctctctcgtccagcgcttaatgctagatctgaagctggtcctaggaacaagagcgagaacgcgctccgggtcaccggcgccatactcgtgttcttcgccgggtgcgccgagggttgatgcatcacagttccagtcggagttgcgccgggttgtatcgccgcgggcggggcggctggcattgaaggtcgatatcatgcctgggaatatacgggcgacgaggggttttagggttggtaagcaggcgcatattatgcctgtgttgcattctatggcggaccaggaggcggcgccgacgttgtcgtctagtttgtggggttagcttggtttttgggatgatagggctgagcggtacgatacgtacaggtgggatcggatgattcggcgatttgtttcaggctgactagacggatgatactggtgacgcagacactagtggatgttatgttagtcgtgggaaaagatgatgtttggaacagggtaactcacaagccacccagggcgaacatgatcattaaagcgaccttttgttttcgaggtaagtcgactgccattagagccgggatgggaatgatcaggatagcaatatcggttgagatatgcatactagcattggagaaccacaggttggtcttgttcaaacagaaaccttgtattgaatcgtcccagaatttggccacgggaatgcagttgaggaatgcactgatcaccgcccatgtgccatagacggcgaggatggtgatcatgatccaacatacgacgcgcatgcggtgcgttgggaagactcgaaagtactgcatcagaattgaggctttggcgcagaggacggcggcgttgtagaaaggaatggtgagccagaaggcctattcggattgtttgttagatgcagttgacagctaatgacccggcttagggcaagctcaccttcatctgtctctcgaaaatgtttggtgggatatctttgaaatgcactcccatgccactgacggcttcgataatgtcgaggcccatgaagacatatgaattcacctatacatctgcatcagtatctggagtcctttgatatcagtaccaatcaaccaacccaccagtgcgataataaccatccagtcatttgcttccactcggttcataagtttcatacgagtatacatcctcatcatcacgaagcaggttgccaagaccgtgaacacaacgcttataatcaagccctgctcgcctcgggaggacataagtatgccgtcatcatctcgcctgaagatcgcatctcgaatgtacaatagattcattgtcacgcgatcctgtggcttcaggaaaacaaaggaatggctactcctcaaagagaagattgcccggaggacagcctaacgatccgatcaataagacgatcctgatctgattaacgattaagatagggcacaaaggagcggtaagagaacaacctctccaccaagaggtgaaaaatcaaagaggatatcgctctattataatccaaagcgcataaagctgatgcgcagcgtcgccataaacaaccttatgcagccccagaaaccaaacggcctaggaaagaatccactatccctttttgagagagacacttaaaggacagccattgtatctctcctcgctcctcggatgtacgggcaagtgcttctgacgcaagacagcatccccgtctgggaagcgtgtttgcagcagcatgcagcgcaaggggcgcatacaacgaatcgggtccagcgttggccccgatggactcgatatgtacatctgtactctgtattaattacaacactatgatatttctttgctgtatttccaatttctcttctttcccttttcttccctccttgaacctggtggctgcagtttacacgggaacaaattatagtttgcagggtcttttgatatatcaatttcccacaccttattttgagaccacagaaacatttaccccttccgtctcactggctctgaatggcaataatttcaatttactcctgtcgatcgtccatagacaatcccctctaccaatcagatcgagactacactacgtataggctattcttgctttctaatttgacgcgcgacagactatacttccacggattatcattcggttccaagttgctgggatgctatgttatgtgctacgtacatatataatagttgaagcaattccaaatcactttgaatatgacatgatgcaatatttgcatccggtgtttgcttgcagataggtcggaggtcatctcatttgagattcgatcatctccgaaggtgacactgaagaagcatgtataacaactgacgataacgagcggggcctgagactgcgctgtcccggagccagctagccctaactgcccatggaatctctcactgcagttggcctacatgtggaaagctgctcggcctcagggaccaatgtaagcttaaatttgtcagacctattggttactggctcctaaatcgtggtcatgtgcgccactttaggttaaaagccagcccccagtcccgacacggtggaaactgccaggcaatcacgaagatgatcagtaaaagccagggactcaaagaaatcagcacaaccttcgtatgaataccctatacagaagttgatcaacttttgtcgacttatacccctctcgttctgcagcactatctcgttaccttggagattggaggaatggttagaagaaggtttcgtctgtcttaatagttgaccgagaaacgaacaacccaatgtagacactgtcttattttgcatgttagggcaatattaagctcatcttgatgtgtaaggggcgctccatttattgccactaaactactccgtatgtaacagatctacccgcagctagaatagcagagtgttcaattaaatattgaatcgaaatgcgggggagagagagtaaatctcctatttgttggaacatccagccacctcattcgataatagcggaggtcttgtaagggatgaccatctacgattgacgcggatatccgctcccgaaaagcttcgtttgctactaatatcaggatctgttcagttcatgcgacctactaattggatattgttaatgtttctcatacgaagaccgtcggtctcaggatgatcttgtggccttgactagtcgcgtcccacaacatccaaagctgctaaccacgcaatccaactcgtggcaatgtgtcgagttttgggaaggattcaagaaaaagcaattaatacgttacgcaatttggacttttcgccaacggcatgtggccaaacaagacccctgccaaggtggtgttgggtagttgacgtgtcacatacgatcattagggctagatattcgtctgggcacagacatcggtacagtaacttccctctgtcaaagcatggaagaacatggctttgcatttctactgccaaaatttgaatcctgtagtggaacgctcatatacgcaatacatcttgttaatatgtagggcgttaggttcttgacttgcgttgcatgcaggttgccttgcttgccgagttgtcatggcagcttgggacttgaatcttgcattaatataaaataaaatatagtttctagtctaatttgaggacttgtaattgatgcgtagaacattgtcgatctgctaaccaggagctaactggagctataaaacggttgcaaagtactttgtcgcaattttgagcaattcgatacgccaagacggctctatacctatctctcgattaacaatgtcatgggatagggtgcatctccttaccacctcttcatctctggtcattcatcttactgcagctagtcggattcaaattaggatctgggcagcttaattggactagattccgcgtgtgttgaccactgtctctcgtggttctgagtctacagcctcttatacgggatagtattgcacatttcttgtgctcaaatagcttggtaggaatctgtcaaattgacacctaggcaacttcttgcataccatagaccgaaaatcttcttcagttactgtgggctgtgcaagctacttggcaagatgtcagctccctgttctaaatcaagccactgctggttaaaatgagaagtaatcgtatttccttacagtctgcagcaactctctttgccgttgtctgatttttgatttctctttttccacaaggaccttccggattttggttgagtctgcaggttgaaacatgcaacgtccctattatagggaatattaaatctccacagagagacgtatataatttgaagtaataatcttggaacttagattgattagaagctgtttgcatagaaccatcggacatggtttctttgttgtaactttgatttaactaccctgctgcaagagaagaacgaattggcttggccttcaaagctattttgtgcttactttttggagatactatactatttacacagcctggggaggaatcggcaaccaattggcctggtttccaacatgtgctggtctcaagctggcggtaactgggcattccccgattgaagaaaggaagaaatcctgcttctgctaagacatagaaggatctgtttctagatcttaacctccgttatgccacgagatctcgtcattgaatcaaaattgtgttggcgtatctcaagtctcgtggaaaatcgcttggcaacatcagaattttggtctccgttttaactggcctgccttcaactgaagatggaatgtttgatactatgatctgagtcccaaataactagagaatgaatgtattgtccaattgcttgttacagacgaaagtgccgtagatttggataggcgataagatagaccgataaggacgcacaggccaccgttcacagagaaatttcatttccacaactcggccaattctttcaagtcgccaacgatatcctcttttctcattgtcgatcggtggaaatagtcctcatacacaggacaaaatggcaggcactactgccgaatccaccaaggccgtccatacaatcgtgctggacgctggcccaattctcaagaataccccgccgctttcaaccctccttgcccagtgcgacgagattatcaccaccccctccgtggtggctgagatccgcgatccagatgcccgcgcacgtgtcgagaccctatacctgcctttcttgaagcagcgatcccccacacccaagagcttcaatatcatcagcgaatttgctcgcaagaccggtgaccgttctgttctcagtagaacagatattgaggtcctcgcccttgcgtacgaaattgagtgcgaaaagaatgaaggagattggcggttaagaagcgttcctggccagaagagaatcaatggaaagccacctgtcaaggaggaatccgaggaggctaagcccgaggatgcggaggtagaagccatcacagatggagtcaaggagactacagtcgcagacatccaggaagagattccaaaggaggaagaaaccgctgcagcgaacgaggctgatgaagtcgccgagattgcggccgtgatcgtcgaagaagaagacgaggacgaagatcaggatgcagaggatgatgctgacgacggagaatggatcacaccctctaactataaaaagcgtcttgctgaggatgagtcgggaacatcgactcttaccgctgcgcccaagacaatgcaggttgcgactatgactactgatttcgccgtaagtacatcccacacaacatctgtctattgcccaattgcttattctgtatagtgtcaaaacgttctcctgcaaatgaacctcaaccttctatctaccaccaccctccagaagatccagcatctcagaaccttcatcaagcgttgccacgcttgcttcctgaccacaaaggagatgaacaagcagttctgtcctcgctgtggcaaggatactctcactcgtgtctcatgcaccaccactgccaacggcgcattcacaatgcacctgaagaagaacatgcagtggaacaagcgcggcaatgtatacagcgttcccaagccaattgcaggcagctcgaacggcaagtggaagggcggcggtggccagcgaggatggggcaccgagctcgtccttgccgaagatcagaaggagtatgtccgcgccaaccaggaagaagagcggcggcagcgtcgcgagcgtgatctcatggaccaagactacctgcccggtatcttgaccggtgagcgcaacagggctggtggccgtaccaaggtcggtgctggccgcaatgtcaactcgaagaagcgctaaatgtgctgcgtgtatgattttgcatcttgattatatgggctggagttttggggcatggaaagaaaaagttcacttggtcaataccgctgtcatagtggttgtcggcctttttatgaggaatgaccatgtcttgtgatttacggttgaacatagaatatatagccaatccatagggctctttatgaacattttaacaaaatctttgttgattacctagatcaggtataatattctctagaatgtctagatgaagcctcggataggttatccaaggacagcaaaacaagtatggacatctcagccatccgttgaccacaagaaaaacaccattcgccaaaacatgggctataccacccggtaattcattttccccagtatcgatcaatttaagccttgacaggagtgtctggacaatagcatattagtttgcagttctgcgaaggcgtaattcttgaagaagacgtaccgggctgctgggtgaggagaaggttgtaacgcttcttcagggtgacacggtgactgagaaagaggttagtttccatgcttcaattgtgcaccatgcagaacaaatagctacttaccgagagtacttgtcatcgggggagaagcgagcggggtgggcagacttggtgacctcgccgttcatgacctatgattgccaaaaattagaatcattggccaaagttaaacagtggccgaggagccaaatgtgcgcgcggcagtctcctcggcgcaaagatttccgtaccttcttcaaggtgtaaacacgcttgccagcgggatcgagggtgtactgttcgtcacaaaattagtggccgatctccgaacggagctgaagattcgctcgcttcgatcgcttcgaagtcgcaatgagacataccataagatgcattctgaagagagcgatattagtacatgagaaatgaagaccacttggaacacgaatcgtcaacttacttgacggtattgatgaattgtcctgtgttagtacttgcgtcggcgataagtggaggaatttttttctcgacgatgaagagctcggaccaccctgcttagtcacggggtgctttttaaacggagctttcgaccgcaaaatttcctttttctctcgcacttgagcagaaaagagaataatctctctagaattacccttgagctctgttaatgtacagagccatggttattctttactaattggcacttgattcaggttgttcatacatacagagacttctaggtaagatgatcctcagctcttctacactctccagcacatccttcaccttcggtgatgacaccatttatttagcccaggcaggcggcacttttgatttctagttgcctgtcgatgatccgctgaattgactacaacggtatctgagaagatattaccatgacgattgattcactcgcatgtttcggcacagttcgctaacctcgaattttgtgtttagtgctttgaatattatcttccagtagcggtttccaggatggccactccagtaaccagcgtggacaagcctgtggctatcgagtcagggcctgcatcagatgcacgtccgcctcgtgcacctcgacctcctaggccaaacttcagacagattcaccagtttcctcttccggtcaatgtacatcatgttcctcctgtaattcctcataaccctctttctcttataagtgttgttctctcgtacctcacattccttatctccccgcctcgtcaagaagtctactcggcctacttcgacaaagccacctcctctatccatgtcacggatgagaggtccattaatgccttatggcagatgggatttttcggcaagggtagtctcagtcgaagtgaacccagctggctggcgcgagagaaaaaacgaagagggttacataatgggaagaccagcgaggaaatgacaagactgcgacgaacagaacgtcgtgaactgaagctagagcgtgcccggatggagaagctggccattgaagaaagactgaaggcggaggcggctgctagggaatctgctccttctgagcctcttgaccaaggtctccaatcaacacccaccgacgatacgactaatggcacagcggctacaacggagaagttctccttgaagaaggcaaaagaagcacgcgcgctggaggcacggcaggcgcgggaattggctgcgcaaaatgagactcttgctgaacaaaaccaacgcgagacttcgtctaacagcaaatccgtgcgcttctcacccatcgtacaaaagaaagaattcctatccaactcgccctcgtcactacagttgcctgactccgtcgtcgacagcctcgatttagatgactttgcaaatgaggagcatcttcaactctccaatgaagaggcgttcttccttgtctactcgcttggagcattgcaaatctacgattcacccttgaaatccggggaagcccaaccaacctcgccaaccaccacccctgccctcctccgacagttctgccaccactccttccaacccgctcgtgacggctccgcatccctccaacctgatgatcccttcctgatctcctacgccgtctaccaccacttccggtccctcgggtgggttatccgctccggtgtcaaattcggaaccgattacctgctctacaaccgcggaccggtcttctcccacgccgagttcgcagtcatcgtcattccttcctacaatcacccatactggtccgaaacggaagaacggaagaactacacagcagagaagcaggcgaggagttggtggtggatgcactgcgtcagccgtgtacaggcccaggtgttgaagagcttggtcgtctgctatgtcgaagttcctccgccagctgcttcggttgatgatattggggcgctgtttggtcaatacaaggtgcgcgagttcctcgtcaagagatggattccgaaccgcactcgtgattgattgtcttagtttcttcttgggtttgtcccgtcaaggctggggatgtttagggcttcagataccctctctgtaaatatgctgtattgtccatgacttcacaaatgtattatgattgcataatgacccatgaaattatgtctcatcctagattatttccaagacaattagtaaattatttagttcaaataatcagagcacagtgccattgagagtgagtgtctatggtactctctcatggcgctagtctataaatggtaatattacttcaagacacgtgatacgcgtttcgcgttctgacgcctccatttgcatttgcatttatgtaacgcattcgaagtgtcaagctgcgttaaaacaaaatatacggatacagcttcccgtatcaagacatactagacttccctgaccgtatgtcgtcaaaatggaaacccaggacgatagcatcgaccttgcaaagttgcaacgcgacgcgttggggctagtatgtaacgaccctgcagcgtccctctcattggactaactccgacatccccaggagcacgatccgtacctttccagatctacacaaaaaggtaacgagccgaatcacactctttgttacacatcccacaaagtcaacggtgcttccaatggtgacggagtgtgcaacggccaacagttacctccgaaaacaccatcaaacccagcgagccttgtgcaccaataccgaccctctttgtatcgacctcgtcagcatgaaccacgcacaatgatgttcaataaaagtggcaatgaaccgggcatcgtaccaggatcgcaattcggcaacatgagctccgctcctggggatacccaggtcatctctcagtcagtgtacgacaagattatcagacaaaatggggagtccatgcaacaagattatacacaaacgggagccgatggagcgacattgagaacactgtatgagggggacagtggccatatcgacctgctttccgaactggacaccgtgcaccacggaacgaacctctcccaagatgacgatgacaacgacgacgggagcaattccgatccgaacgagtcttctccaatggcttatgcacccgatttattccccgaatcgcaacgattcctagcagaaacacccggaacagtggtgaaaaaaaatgaggcgggtgggacagcagagaccccgagcatctcgcggaatcccctggctagtggcatcgagtcaagtggtgggcttcttgggctgagccaggttttcggagctacccaggccccgtcgtctcccattgtccacggcctgcagacggagcttgtatcggatcgcccgtcgcccaatatcccaattcaatccgctcgtgttgtcaatggtatctcgtcgcctttgatgggcttgccggttcagttcacgagagactcatccgaaccgaatatgaactatatatcgatgaaggaatcgcagaaaaggcgcgataagactttgggggagaggttgactcggtcggccgacaatatccagtcggaccagagtgacaaggaattctataaagagtcgagctttatagaacgtgcacgacgacagcgagagattgacgaggaagctgcggctcaattcgccgggttgagtgctcctgccagatctacatccaatctctccgccagactacggactccctccgagcagcccggtgaacaacaagaccaggaaatgatagaagctgttgccagcgaggaagaaaccgaacaagaggaagatatgcaagtgcccaggtcacaagagcctcctcaatcttcagccgaagaagataaagagaactacgaggggcctccaatggatactgctgctgccgccgccgccgctgccagtgcccacgatcgactatctcaggtacttgggtttgagccgattctctccccatctcgcatgcgagtagacgagcaaccggatgatggcatagctcatggaggctctggtagtcagccgaacggtgctacaagttcttcccaggccatggtgaaagactctcaaccatcacctcagtcatcggcaaagctcatagaacccgaaattactaggaaaattactcatcggtcgccttcgcgttcgcatatgaattctcctactcgagaccttccctcctctccctgctcgcgaccacaatcaagacattcgaacagccatactcagagaaatggctccgtatcaaatgaatatgccatccaacatgttcagactactgctcttaacgagaatataccaacatactctagcaacccctcggagcagcaacatctaaactcatcgcattccagggtggaagcgggaacttcgggcaactcatcatcgatgccatcccgtgtggctgagacacctatgaatcaacgtcttaagcatctcggtgacatggctcgattgacgagtatcccagaaacaagtcccagtcactcccagtgcaattccgtggctgggtccaatggtgatggactcaataatgaagacgacgatcttccacctatgttgttcaatgaagtccccagtattcgaaataatcatatccgcccagccggggcaagggcactctcttcgcctctcaaaaagctgttgtccagtccgggcggaggccaacgcagggctttgacagaaattgcgggagatctttccccgcaggtcggggctggaggatttgatatgggtattggaattttcactgctgaggatcgagaattcaaagccctgatcgatggatcgccgactcgaccgaagaaaaaacggcgtggcaacgatggctcgagttacattgcctccgaccctatcatacctttcacccctcgcacacagcccccaaaatccgttgcacctattcgagcaacacaagaacgaccggctcccattcctgaagttccagattcggatgatgtgcctttagtgcaactccccgaaaaagccgtacgaaggcaatcaaagcccccgcgacgagcccctgagaatgtttgggaaatcgagagatcgcctgagcagcccttccgccagagatcaagaattggcaagacttctacctcgatgtctacgcaagggaagtatgtctcagaaaagagatcagtacccccaccaaaggttgtcgttcatagtcgaccaccacctccatcgtcagagctcactgaggtttcatcaacaattgcctcggatgatataattgagtcagaggcgtacagtgtcgatgactcgccgactacgcctcgaccatctcacaccttatcggaaaacaccgtggtcgctccaagtcaggttctttctgtctggatgggtcagaaacgcgcatactatccagcgacatgctttgggacaccgctaggtgtatcacaggttaaatactctgtgaggtttgaggacagtcttcctattgaggtaccgaagggtgccgttaagagatttgagcttcgcgtcggagacgctgtcaagatcgagatggataatattccaaaggtcactcatgtcgttcggggattcgacgacaagcttactaaagaagagttggctaaagccgctgacgatggcctctatcctataaccgacatttacggtcataccactatcatagtcggtcccaagcaacgcaaaagtctgccaaatggagggatgggcaacggcgagaatgtgattaaagtacctatatctcgtgtctatcttgatactatcctgtggaatcaactgaaagatcgcgcgttcacatatcgcccggcgcctgttcaacaagagagcatggtccataccccatccgaaaggtcatccgcgcctgcttcacccagttgtcgcttgtcccgcagccttcaccaaggtagcggaatctttgctggtatggtgtttgccgtatcttacagggaggatgaagcatccaaaaatcgtgtgaccaggttaatcgtcgacaatggcggcactgtattacatgatggatttactgagttattcgagccttcaacaattgtttctgttgatactcccatcaaaggtggagccaaggatgcaggtatcaatagcaagggtctccgacttacagctcttgctgaggaagtcggctttgcttgtttaattgccgatacctattctcggcgagaaaaatacatgcaagcactggcattgaacctcccatgcctgtccgggcggtgggtagaggactgcatcgcccaaggtcgcgtccttgactgggatatctacctcctcccagccggcgactcaatgtacctcaatggagcgacaaaatctagagtcatggctcccaaccctccatccacagcccgcctcaccgaaaccatctccgcacgaaaaaagttgctcgcagggcaatcggtgctcgttgtcatgggccgtgggaaggtcgaggaaaagaggaaagcctacatcttcctgacttacgccctaggggcttcccgggttgagcgtgttcctgatctcggcacggccagcgcattaatagactcgcagtctgatgccggtctgtcgacggactgggactggatctatgttgacgatgcagatcaagctgctgcaaagtcgatgttgacacccaaaccgcagacgccgagaattcacttgttccatgggaagaagcgtaagaggtcgattgcatcgtccactcctacaccccctaatgagccaaaatgtaccgcgagggttgtcggtaatgagtttgtttgccaaagtttgattttaggtcgcttgtttgaggagtgattccttatcttagctattgataccatagtatatcgtatctagtctttaatggaactatttagactcacatttacctacaaataaatgtattcaaaatcaacaggacgaaactcatttggtatctctattctcgaaggaagccaatacaacgttatttgagtaatcagcgagtcataccaggagtggtctctgtggtgtcagatagccgctcagtagcagggataggctccgggatacctggctcacgagaggtatcgtgcatgtctccaactgccggctctttgcctttgagtgatcgttgactcggctctacagccaaatcatgctcggctgtagatataggctctggtgcatttgacgtaggtgcatcgtgggtgttggatatttcagggtctccagctgcttcctctgtagctagctcagtgcctggcttactttcagtagccggtgttgtctcctgatcttctcgctcaggggatacactttgggaatctccgacgggtggttccgctgttccaggtgtctgctctgcgcttgactcgacagctgctaactgattatccccagacgccaagataccctgtgattgcccgtcgggtggttgcatagaagcctggggattttgttcgcccgactgctcgatgccctccggggctggttccacaggtccttcgacacggaagaagtccccgttcaaaaccttgatgagggcttccgcttcaggtggtggtggaatcgatccgctcagcagctcctttgctcggatttcccgcccatacaactttttgtttgcatctgctcgctctccaagaacaccaccctcgactgtaagaccgccgtataatccacgggtcttagagtaggcgaacaccccagttgcgcccttcgtacccactactcccccagcctcggcactacgaccaataggcccgacggccatagatatattcccaccaagagtcaagtttcccgcctgcatgaatgtcttcactgctgcatcggtagtcagaacgaacacgaaatcggtcaattctgcgccaaattgaccaccggcgccgacgccgcccattgccatggctgacggggcggaccaactgccatctgggagacgggcgacaatcagtcccgagccaaagcgtattgagcccaggaatccaagtctgagcgctgtgaagacggcgattccctagcatagaatgagtcgggtctgtttgggtcgtttcacggtaggatatctcttaccttggctcctacgaatatcttacgtgggatttttccatcgatcttgagtttcgggttggtgaaggattcgagaatcgcagcggcctttttgcactcgcctgtggaacatggtcagcctagagtcagctatgtggggtagcagtagcacggaggatgatactagatagtgaggcaggcaacgggctgtgcaacgggttcttcatggcatgtatcttttctctcgctttgtgatgtgctttgcaacaagatgtctacgtctacgcaaatttaagtgatgttgttctcacaaggtcgtatatcaggggttggcgtttaacttaaattgcgcacggacgtttcacgaggttggtatacttcgcgattgtacggagttacaggagtggacatggagtttcacaggttcatcggatttctaagtaattctatgcataatttagaggttcacacctctatctggcaaaatgttagctatgttacactgaattgattcggaagaatgaaactgccaagtatcaagggcctcgtatgatgaaacatgtagcgagatatatctattatgttacctaacccatatccaatgacccagagacatagtcatagtggaatcacgaatcccaatgtttatgtgcggcttgatgaattacaaattatgtagtttgcttggtagatcatccagggagggtttatgcaagatatagtttcatatcacgcgtcgaaagtaggtagctgcggtgagaatataatattctcggaggaactatcgcactctctatgatctatctacacatgtaatgtaacattgaaattgaggcgaatcaggaataaagttcgtccagagcatccatggataaggctgacgggccgcggttatgcttaattttcgagccagctgcacttagggcttacctagggaaaggggtacccggccaacgggtttgggccgtgcatttggccggttaagccgggccgtaattacctcaatactattatgaaacccaaatacaatgtctcaaggctggaagatcttcggaaataagcctactctagtgcaacagttgcaatagtcctgctgagagttgtacatatcggctccatttcgctacaacatacacatcttgcctcaagtccccagcggttggaccattattcccgatgctgttccagaccactctagtacttctcgtacttcagacgactagcgtggcatctgtgtccttgaggcgaggagcgattcccctcaccgttaaaacattcgattatgtggtcgttggtggtggtaccgctggaagcgtgatggcgacgcgattagcacagaacgacttcgaagtcgccttgatcgaagctgggggacactacgagcttgagtccctggcggagtttcctgcagcggatgcgttgtcgatgggatcagatcccactttcagctcaccagaggattggggctttgtggcaagagatcaatcgggtgccaacgggcggtcgattcatttcgcccgaggaaaatgccttgggggatcgtaggtatctctttccaagtctagcatatcagatcaaaactaatttctttgcaggtcagcgttgaatttcatggtttaccaacggtaaagccccatgaaaactaaatgcttaggctggaataaccggacatgcagtccaacacgcgaatctatggacgtatgggcaactacagtcaacgacagcagttacgaattcgacgaagtactctcattctataagaagagtgttcagttctcgcccccaaataccgactatagggttcagaatgcttccgccgacttcgatgtcgatgcctacgactcggatggtggcccattgcaggtgtcgtatgctaactttgccgagcctttttcgtcatggatgagcctcggtatggaagctatcggcattgatcaggcaaaggactttgtccagggtaatataatgggagcccagtattgcgcatcaaccattgacccagccaacgagctccgaagcagctccgagcaatctttcctatccaagatcaggcccaaatcactgaccacctatacaaatactcttgccaagaaggtggtctttgatgaaaataatagagcaacaggagttcaagtgaaaggattgctgggtgatcttgtcgtcatttcggcatcggaggaggttatcatctctgccggtgcctttcagtccccccagctccttatggtgtctggcattggccccatcgctcatttagaagagcatggaatcgacgttatagccgatcgaccaggggttggtcagaacatgtgggatcaccccttctttgctccttcttaccgggtgcgagtgacaacattcactaaatttgctactgacctgatgtacgcggctggccaaattgccaaaatgttactcaacaaaaaaggagtcgtcacaaatccaatcgcagatttcctggcctgggagaagattcctcgattcttgagcgaggaattctccgaggaaacgaagagtaaactggccaattttccatccgactggcctgaagcagaggtgagagacattctatcagatatagagaaaggctgctaacacggagattcctagtacatgtctggtgcagggtatatgggcaacgtgtcaaacctcctggcaatacagccaaaagatggatatcagtacgcctcgatactcggtgttctgattacacccatgtcccgaggaaatgtcaccttgaagtccgcagacacctcagatctaccagtgattaatcccaattggctcgatgatgaggctgatcaggaagttgcaattgccatgttcaagcgaatacgccaggctttccagagtgaagctatgcagcccgtggtcattggcgaggagtacaaccccgggccccatgtccattctgatgatcaggtcctcgagtttatcaagaataatgtgatgaccctgtggcatccgagttgtacttgcaagatgggaacttccgacgatgatatggccgtggttgattcccaggctcgggtttatggagtggatggactgcgcgtagttgacgctagcatatttcctttccttcctcctggtcatcctcagtcgacggtttgtaggtttctctcagtactgctctgatttgttctccagtgctaaccgtgtcacagacatgcttgccgagaagatcgcagcggaaattattcgggattcctaagcgccctaaaacagtttcagaggttaacacaaatattatccgatgacttgcgacgtctcgttataaattgatatgtagataataaataagcctgttttttggtcttcctgggttgtgcttacccaaccctggaagcgatgccatgaaacatgggcttgaacatggcaattgtgcccgtatctctaaaagagaggaagaaataaggaattgggaaagttgatgggtaaatgctcttcctataatacagtaaacaccagatacaatcctcatatcgctacagaaacccataagttattggaacaagacatcatgcacacggaaaatgccctcatttcttggctgtcttcttcttgcccttcaaactcttcagctgagcagcccgttcggctctctgctgacgcttcctccacgccaaccaacggttaccacgatcatgggccatagctgtgatgccggccttctcagcggcccgaccaatttcccaattagcctcacggtacatgtaaccggggcggagctgggggccagactcggcttccacagccgcgacatccgtcacacggacaccgctctcatcaacagaagcaacgagatcagactgagccacaacgcgttccgttatcggcacaggtgccatattcagcttgcgtcggctgggtgcattgcgagggtgcggaagctgctcatccttgtcaaaaacgactccgatataccggcgcttcgagtgcttcagtgggtcgaggtagtagcgcacgtagccggactgtgttgcatagatcgtgtggtcccgtcccattccgcagttctcaccgggaaaccatagcgagccacgctgccggaaaatgatgcatcctgttaccacgtactcgccgcccgagcgcttcgctccgagacgcttaccggccggatcacgggagtgttgattggccgttccttgggaggcgtgtgaggcgtaacgcacttgtgtgaatgggaggagtgcgcgggagagggagggtgttggtgtggttttcgggaatgtggatgttgcggagagagtgcgcaggagggattgcgattgcgagagcgtcggtgtcgaccggattgtcggggtgaaggctcgctccagtgcccgcaggggcgttagcactcgcggcttgaacatggtgggtaattggattgtttggaggtgtagatcgtgaagctccaaaggggaagtttttcgttcggagatcaggcttggcgtcacgtgtgtacccgtaaactggcttcatctatacaccatgcgaactcgttctattttctatacgaatacccgttcattctgctattagtgtcgctgtgatttttgaactatgttgcagagctggcgccaagccatttgggctcttctccttcttgtctctgtcgctcaggcccaattcaacttcttcgaccagatgttcggaggcggcgagcagcaacagcgtcaacaacagcggtcgcagaacgctcccagtgacagtgatcggtaccagcagatgtggaatggaggtaagaatcaaatatctgattgtcgagaacatgccgtcgaaattgcacttgccctcgtgaccacataactgactctttccttacagcacaatgcgaccactacctctgccccggaactcttgcttgtgtccacttcccacaccactgcccatgccctcaccctggtgtcgaggagaaggtcgaacttggagaaggaagtgctatttgtgtgtcgaagggaggattcaaggcgggcgaagctgcgcggaaaattgaattggctcgcaagggtcttttgtgaaaaattcggtctattatctttatgttatcatgtgaatcatgtgcagctgccgatgggttgtgaggtcaagccatggagtttggtgccgctggacggattagtccgataggattgccatgaatctttttggatatgcccagacgtgctcaaaatcggaaagccgacgctgtatatggaaaagaatgcctatattctcatatataacctgataattctacctaacacatgtcaacgagtctactatgtatatgtagacaaggccacttgagatgcgatttctcacgtctggccgagcactcctcggtaatactcataagtagtagagcatggagtaatagattagccagaagactagctgaatatcttgaaaatgaaccgccgtgatctaaatgagggtagtatgaagtacaaccgttataaacgatgtgccgttgctatctccgattatctccgcagtgaccttccgtcatcggtgtttcagcctctcggcgatggagttactacttaccaactttcatcccatcaaccttttgcctcaatctttgtctgtaagataatctggtctttctcggttaatatgtggggttcaaggctccaactcctgcaaaaacagtggacaccagctcgaactcgagctttttcgagcttcagaagtcatggatctcggcgcggtcctcgcaatagcataagaagaccgaatctcatacagacttcgaggaaagcggagccctcacataagaatgagcctgctacttctgagtcccaaggtggcacaagtcccaattatgacccatcgcaaaacactctactttctcccgtttacgtgcctgaagatcccacaggtgtgcttaaagaaacccatccagcagtttcaatactggcgaactcaggaatagtcgtacaacgagaactagagatgatgaatgttctgatgtaagtgcgcaagtgctcatatgcgagaaacatgtgtactgactccttcagtggatttgaacaagcgaataaatatgtcatcatggatgcgcagggaaatcacattggatatatggcagaacaggacaagggattggtgaatacactggcacggcaatggttccgcacccatcgaagttttgtgacacatgtatttgaccgacaacaaaatgaagttcttcgagtaagttcatggaatggccgtcttatagcacttgactgatctagcagttcaatcgcccgttctcttggatcaactcctatatccatgtctataaccctcttgatcaaacgccaaatgcttactcggcgtccacctctcttcaaggcacagcacccggtgctctcattcaacctggcaacttatcgagtgcaaggatatccccacttgatctcggtcaaatgcgagttatcggcgaagcccagcagcagtgggcacctttacggcgaaagtacaatcttttcactcatcagcagtccccaaactcggaaacagacatgggaacccgtaatttctcgctatctgattctggcttatcacgagcacagcagatgcaactgatacgaacacccgaccaacagcagggtcaattcaaccaatttgcctacgttgatgagccctttctatcatgggatttctctctgaaatcagcggacgatcagttaattggatccgtcaatcgaaattttgcaggctttgctcgcgaaatctttacagacaccggtgtctacgcaatgcgaatggattccgcagctctcggcacagaaacatcccacgacaagaagactttgggcatgaccctcgaccaacgtgctgttatgttggctacagctgtaagcattgatttcgattacttcagccgccaccaacgcggccttggtatatttgacttcccgccatatgggttcaatatgggcggccaggcccccgctgaaggtgcagctgcagaaggcgccaccgccggtgaagcaggggccgttggtggagtcgctccagggactcttgagcgagccagaaccgctggcgatgtgccaaatggtatggtttcaggtgctaccaccgcgggtgcaatggctgggtatgaagcgatgcagagggccaacacaaccgacccaaatgccccagcatcggagccggtggacccggcgtcacaaggcttcgaggatcaacctcaagatccttggggtaaggatagtccttggggtgaggaggattcttggggggagaatgacttttggggtgatgatagttcttggggtgacggaggaggtgaatgatgggattgttttgaccggtgatgagggccagtttttgtactataatattcactattagatgcagtagttgttctttaactagacttttgccgttcacctggacattttcccgtcaccctaagaaataggttccccatggcattgccatgccttgtccaccgccccggaattattccatccccactttcattccacccaagtcccccccccgcagatacctcaccacctaagtatttcgaattgcagttttaattcaatcaattaaacagcagagatggcgtcctccgtcgcccagaagcgccttttccacgaatacaagaacctctccaccaacccaccagagggtatcactgcaggccccatctccgaggatgacatgttccattgggaagccctgatccagggccccgaggaaacccccttcgagggcggcgttttcgcagcggagctgaagttcccgcgagactaccccctgagcccgccgactatgaagttcattggaggtggcgtgtggcacccgaacggtacgtaaccgagacaacccaggcgcctggctacttgctcgctttctcaatacacaatggcaaacatcttactggaatttgaattacagtctatcctaacggaaccgtttgcatctccatccttcatccccccggcgatgacccaaaccactacgaacacgcatcggagcgctggtcgcccatccagagcgtggagaagatcctcatctccgttatgagcatgcttgccgagcccaatgacgagagcccggccaacgtcgaggctgctaagatgtggcgcgagcggagacctgagtacgagcagaaggtcagggacgaggtgaagaagggactgggtctgtgagccgggctaggttgcggatcaatgcctcggttttctcgttgctgcgcaggtggatatttgtcaacatggtctgcttgtgctgcgcgggagtcaagatttgatgactggcgttcaagggttcatctttccttatttgcatggcttggatatgcgatggcttttcggtctgtacagtgcattcttatcctcgcattatgatagcggatgaaatacatgcagttctttcgattcactgttctcttctcttgcaactacttgctaaatcttgcatttgctttgggtttctactactacatggcaggtactatggtatatcgtccctgtctttatcttatcacatctattccttcctagatatacagatcgtacagcatcttactcctgccgaaacatcctccgattaatccattcctccaaccccccttggcacccatacaagatctcaatctccgccttcagattcaaaatcagcatccgctgcaattcaacacgccactctggctccggtccatcgctcgcccagacaggactgttccgaagcatggccataatcttcttacggtctcgcgtcgtcagcgagagaagagcggtgtcacctagtacctccggaactgctatgatgtctgacactcgaagacccagccacttcagcctcggtatactaagccgagcattttggtgtagttgtgctgccgagccgtacttgtacgtcgacatgatggccatgccatgggggtcaccatcggtgagggcatagaaacggggcggatgcctgctcgggttggagacggagtcggacattgcacgcaggaacgttcgtgtcatgaaatcggggtatccttttccctgttcgagtacgttgagctcggttgctcgttttggcgacaggatatgctgaagcagagacgcagcttaccgtgaccattattccttctccggccaatgctctggtgtggtaacttattcgcgcgagtcggtggaagactgcctgtgaacagggtgtgaacagggactcagcgtactggtactgcatatgtggtctctccatgcctcatacctctttttcgatgaccagtacccagcgcactcttgaaatatcaatctcgtctccgtcttcgatgcgaggaatcaaactgtcctcggtgacagactgcgcatcgatcaaaatatgggagccacggatcaaacgaaaatctcccgtcaccagtccttttgctgccgcttcctagaaagtggtgcacgaggtcagcaggttgacttcgcagtgatattcccagaggatccagcaggactaaccacattcaatgccgttctgttcactccgatggtatacgccaggtcatcgacaatgcggtccacggtacactgcacgcggaagaattccgggtcgatgtagtatatgtctctggtgattgtatgggtgtgttcagcataccttccagaccggttcctagacattgtcagctcacctcttggagattagctggcccgttcgaatagcttggtccaatatagctaggattcgaaggatgacggctatcagaagacgcagactcggtcagtttatcatctaagaatgatacctaggttgtgttcggatcatggtaggaaagagcttactgaatttccaggcctcatgtgccgtctttcctggccaagagtatttcctgtatgtttcaactctaggactcgcttccaatgccccgttgatggggttgatgatgcaggcaattgggctggctctgcgcttgagggtgatggagatgcttgcctctgccggggactgtgagagtccgtggatgagggctgcgagggtcttgtcgatgaattcttgggctgagggatctcgaccatcgtctattttcaaagtgtgaatgattgatggctcaaccattgccattggagtgggttgggcaaggtgaggatgttctgggtttgaaggataaatgtatctacccgtgcaccgcctgagcataatgcttacatgacactttccatagcatatccagatgaatctgtcatttgaacggtgagttttatataaatagggattcggttcattgctagtaaaaagaagcctttaacttgctatgacttgatcaatagaggtcagaagggttactgtatgtcgaagatttccatctccttcttctcgtcgaatctagaatttatgaatctagaatttattgccttgagcatctgtacgctgaatagtttcttttggtctgcatatcttttctttgaggtctgaggttcttgaagttagttgtatagacctcgggatgccaggccacaccaccactaccactaccgcaccaccataggcccctatcttttgatcagaacatccttgataccttcatcctcctcttcattcttcttctttcaatcaattgttttcctggcctcatatgatgtaaaacattcttcattctacaccgcagtcgtgatactgatgactaagcttccccggtttcccccgtgccttagctcctgagctggttatcgtctttactaggttggcgaaaagatccaattcctcatatcatgtcttctactcctcatattgggccgtggagaacaccagctgatggtcatctcaccccagatgccaatggagatcttaagaccgattactcgcgctggcgattgctcgatgaggaaggccgtcagacatggcggtatctcgaatccgatgtggaaaaccaagaatggccgcagtcagtagctgataaatatcatctgggattgccaacagtatttaaccctcattgacaaaaatctaaatcctccaatttaacggcgcattatagggtcttccagagctgccacaggccaagacgccattggaagctgccgagaatgggctttcattcttctcgcatctgcaactggagcccggaaactgggcttgcgagtacggtggccctatgttcttgctgccaggtattttgattacttactatgtgaccaatacccctattccccctgagtatgcaacggagatcaagcgatacctgtttgcccgtcagcacccagaggatggtggatggggtctgcacatcgaaggccacagctctgtattcggtacttgtatgaactatgtggcactgcgcttgatcggtgtcagcgaagaggacccgcgcatgatcaaagcccggggccttttgcataaatttggaggtgcgatctacggtcctcattgggctaagttctggctcagcattctgggagtgatggagtgggagggtgtcaacccagttccccctgagatttggttggttcacgcattgcaacctgtacaacctctcttttattaaccgactacataggcttcttcccgactgggttccctttgctccttggcggtggtggattcatatgcgccaggtgttcctcccaatgtcttggctgtggtctaaacaatggtctcaccctccagatgacttgacaagacaactgcgcgaagagttatacacccagccatacagctctgtcgattttgctgcgcatcgcaattcaatccacgaggtggacaattactaccccaagacgtggctgttgaatacagccaatgaactgttggttcgggtctggaacccttaccttcgaccccccagtattgttaagcgagctgaggaatggacctgggaattgattcgcatggaagacgaaaacaccaaatatgcggggctgggacccgtcaacaatccaatgaacatggtggcttgctttatccacgacggccctgacagttactccgtccgccaacacagggagcggttgaatgactatatgtgggtaaagagcgagggcatgctcgcaaacggcaccaatggcgttcaagtttgggatacggcattcatcacccaggcggtcgtcgttgctggtttcgccgacgatcccaaatggcgaccgatgttgactaaagctctcgaattcctcgaagaccatcaattacgagagaacgtgccagatcaagagaaatgttaccgccaacaccgcaagggtgcttggccattcagtaccaaggaccaaggctacacagttagtgattgcaccgccgagggtctccgttcaacactccagctgcaggagatgcacggcttccccaagctgatctccgaacaacggttgaaggacgctgtcgactgtctcttgctcatgcaaaacccaagcggcggcttctccgagtatgaaattacccgcgcttcacccaaggtcgagtggctcaatgccgcagaggtcttcggcggaatcatgatcagctacgaccaccccgaatgcacaacggcatctgttacggctctgtcactcttcagcaaattctaccccgaatatcgcgccgacgaaatccgcgccgcgaagcagaaggctgtcagccacatcaagcacgtacagcgtgccgacgggagctggtatggctcttggggaatctgcttcacctacgcggcgttgttcgcgctagaaagtctggccagcgtcggcgagacatatgaaacgagcgccgactctcgtcggggctgtgacttcctgatcgagaagcagcaggcggatggtggctggggcgagtcataccttagtagctcaactcaccagtatgttcagcacgagaagtcccaggtgtgccagactgcctggtctcttcttgggctaatggaagcgggctacccgcacaaagagccgttggagaggggcatcaagctgttgatgtctcgccagcagcggaatggcgagtggctgcaggaagcaatcgagggagtattcaaccagtcttggtaagcttgagctgtcctgatcttctggatttgatttactaacagtaattctagcatgatctcctatcccaactacaagttctactggcctatccgtgccttgggcttgtatagtaagaagttcggcaatgcagagctcgtgtaaaactagggaaaataatactttacagaaatgtatctaatcaataataacgtgcattgagctggtattgacttggtacatgttgtatctcttgttttctctcatcttcccaaatgcaacatccaccccttcctcgttgtggaggagtacaacacgtgaccatccaaaatgatcaacagaagcttgggccactgcggctccttgaaacccccacgattgtttgcgattgctttcattcgaaccaaccacgtccgtcagaccctgataccatcaccatgaatgctgcagctcagggtgacaaggcctcggccgaatccaactaccccatcgctatcgaacactacacccatgccttgagcgagctaccccgcgctccggcatactacatctcacgatcgactgcctattcgcgcctcaagcccgcaaatggcggacccaactatcaggccgcactcgaagatgccgaaatcgcgctccagctcgccaaagagcggggaaaccgcgagtttatcctctccgctcagatgcgccgtgccgtgtcgctgtaccagcttgagcggtatggagacgcaggatttgtgtttgaaattattgctgataaaaccaagagcgagcaaccgctagcgaatagatccgaacaggtgcaagctgccatgggaggaccaggatctgcgtcgaagggcgccagaaacaactacagcgcccaattgccgatttggaccgccaaaattcaacggaagctagcagagttacccaaggacgacccgaagtgcactgtatctgttaccgagttcccgtcttccgtatacgttccgactggagacgagatgaaggctcagtggaaggccctcaaggctggcaacgtgggagtagccggagcctcgcagactaagacacagccggcagagccccagcagccatccgcagaagagtctggttcaactgctcgacttccagactcgagctccgctgcagctgtttctgttgccccggagaaggttcgccatgagtggtaccagtcacaggactccgtggttgtgactctttatgccaaggggatcccaaaggacagtgtcgcagtcgacctgaaagaggatttggtaagcgatattctgtctggccatgattggactttggactaattctaaaacagatctcgctacaattccccctcccatctggctctgaatacgactttaccctcgacccgctctatgcagctatcaatcctgccgagtccaaggtctcagttaaaggcaccaagatcgaactcactctgcgaaagcagaaagccggccaaaaatggggtgccctcgagggctcagccaccaaccccgccgagatcaccgaccgtccagcggcgcaaacctcgccggctcccacgggtccttcgtatcctacctcctcacgcagcggccccaaggattgggacaaagtcgcgtcgtcacttactgcgaaaccaaaggctgatggaaacgcagacgtatcggatgacgaaggtggtgatgctgtggacgggttcttcaagaagctgtatgccggcgctgacccagagacgcgccgcgctatgattaaaagctacaccgaaagccagggaacatcgctgagcacgaactggtctgaggtcgcgaaggggaaggtggaagcccaccctgaatgattatctacttgctattttctgtcttctgctctaagccgcatgtagcgaggtgtttcctgggtattttagcttagttctcaatttaccgtctcttctcaagttgtttattaatactggttcagcaagtagttcaatttgtcgacaaccaaggctaccccactctatagacgagacaccacagtcgtcccatccccataaagcggaatagcagacccagctccatcctggcggcgcatcgtagccatgacagtcccacccacgaccttcaaagaaaacttcgccccttcttcactgggccaattcatgaaagattccccgtcataaacttgctcgaagatcctcgccggcttgatcctctgcataatcggcgaaatacactgtcctttatcggcgttttcctgctcgtacacagtccacacattcaccggcttgttgccgaagagcgatttgttcgcattgtagagcgcacagagagcttctgccgcagggatctcgcgagccccgtccgaggaagtgttggagagcagaaagccttcctcgttgacgattgccgtgacagagcaggtgccgagtttgtcggcctcgaccgcgtcgaagtcggcccatcggcccattttggtcgtatcggcgtgcactattctccgatgtcttatagcggaaggcatggtggttggatgtttggtaaaagagaaaggagtagatagattgtcttgggtgatgaggtaggtgtttgtgtttgtggatggtattttgctaatgcttgtttcgtatttgggttgactggattattctttccatggtgcgattgagtcggagtatatatacacatttatcactgccctgagaatcccatctggaaaattgggctggaatcaaggctgcaaagaacgaaacccaacacagcagcaacccgccatataattgttggctggtaaggttccacgggcgttatagaccggggtattgtgataagggatcgccggcactaagacgaatgaaattaggttccaagtcagcttagggctgcaagtagctatacaaaagcaaaatgataggctgtcggcgcttagcgctctcgtgaaacttatattggcgccggccccctaaacctcccaactttcgccgatccctgtcctgcatgccataactctgcccaagtacggttggataggcttcttagtctgtttacatcgagacacctgcatcattgacggggatggttggcccggaggtaaagccacgtctccgccagcctgattgagcgaatagatcccctcacttgcaaagtgatgctacaggcatgaatacgatatacaattattggaagtgttccaggcctcaggtgctgacattctacccatgtattcggtagttcatggctggaacgacccattcgcggatccgcgacccctgcttcatggcaaacatttcccccgcctagtaagctgaacctgtaagctaggaatgactgaccgctagtttagctttcatcatacgaggcgcgaagtctgtccaacgtacgttggctctgttggttcgtgtttggtcggctcttcccggctcaggcaatcattggagggctgtattatggctcatcgacgccaatttacggacaggactttgttggaaacgatgtatcgattgcttctaggattttcggaacttgttggcactgctagggtccagttgccatatatccatgtccaagtggtggcgtatccaacgcagtcatgagggaggcgatgtgacttggcttgcagctctttcgagctatctattttacatttttgagatatgcttcgtactaataaacatgcaatgatatccaatcatatcagaacctcattgttggtagccaggtcaccaacgcagggaggaatgtgtcacatccgggtacaagaaccaacaaattgagcttgttttctgtttgctccaagtaatgatggcttatagaatcaaaacagtcttgggcagaaaatatccaacgaatattcccgccgttggtgtgaaggacaagaatgggatagcgtgggcggttatttctgagaacgtgcatccccgtgtttccttctgataattgttctgattattcttccgagtcagtgatcagtggacatatgctcatttccggtgattaactcgttgagttgccaagtttgtgtgtttctatagttgttccttatgttgccttacttctttcatgcccttgagctagtatcgctttcaacttgtttttttttttctgctaaaagtcgtaaaatgtatttcgaacctttgtatatgtccaataaatcacataaactttgagtttactcttcctcttcctcgcccttgctatcgcggtataggaaaaattgtataaagatcgccatatccagcagcagcgtaccagcgctgccaatcagccacgacaagttcaccaatacataccggccatacagcgcagccgcctcgccaggacgacaatgcgcacggtggctgtgatggcccaggacctcctcagtcgacccaccatggcaaacaggcgagtatgccataatagaaagcacataagtcaagtttccaatgcaagcaaagaggaagaacagcagggaaacaccatccgttgatttgcggcggtagttcaagagaagctggggcagacgtgatccaaggtacaaagctgcacagaaatagccgaatacttgacccagaacatccatggtgataggttccgggtctggcgatgctggctttgctgccgggctgacgaaccagcccaccacgcctgcagcacagactagagcgacggccgtgaagttgaaaaggatggactggaggacggagatgcggcgacgacgagcgagttgagcacggcggcgcgcacaatcggaagtgggttcgaagaagggcgttgcgggtgacagatgggtggcatccaccgaggagaagatatcatggaaagagtttgtcgagtgccgtcgtccggcggacggcatttgtgtatggtcttcgggttgctgtcccgctacgtttgtagccgggtcctggatttggacatggccgttgggctttggaataagggatgatctctctgttggcgctggttcatgttcggcactattccgctcctcgtcggaagtaccgttggctgcaaaaaggtccggtgtggcggatggagatagctcctccttgaggttgaatccccggtaatagaagcactgtcccagcagaacaatatctgctaaagtgtagtatactgcaaggatgatcatggtaggaagcacgccttgtaggacggcaccaaggatgttgaacacatcgccagccaaccagatgatgaggaagatgagagagaggccatctgcagagccacgtcggaagttctcgatgatttgaggggagaagacgacaacccaacaggcaatagagattgatctaaatgagttagtattggactaagaaacaaaacatacagatatcgccagtcttagtaaatatagatccaacgtcgcacatgtattaaatgaacatgacatctaacgaaaaacaccaaagaaggaaaaaagagcagacttacccacagatgccgctaagggcctcgatgttcaaattagccgcctgcgagggaaacatgatgcaggtgaaccgtgcgattcagagtcaagtgattctgaatggtttgggaggcgaaacaaggtaaaaagtagaattcccagtataaatgaatatattctctggaagatccgactctgtccaagtcgaaaatagggcaattggaggtgcgcgaagagaattggagaaattcacagacggagccatggatgacgtctggtcacgtgcatgggagtatacaaattagggcagggcatttcttcttgtttccttcatttatttcatttccagcagtttatgaagatacgggttagataaggtgatattcccttcaccatggactaccaattcagagctattgacacaatccttactgtggtcacatgatctgcgtcgttaatagttgccacattggcgcccttgagcatccgtaccgctactatagcaaaccatgacactattgtcctttcataagcagctctaacttgtcctgggcatcacagaaaatatttatagccttcgtctctgtcagcaaagctcgaaattgatcaatgtatccatccttacctcggtcagcttaatctgactagcaccacccaggtcgcgggcaaatctgatctggtagtttccaggatcgctgatgagagagtactcctgcgccgggattggaagtgtcggctcaatatcaagtagcgacttgacatctcctacataaggctgagtcaactgtgtcaacagacctggcgagatagtgaggtgatccaccccagcgaggcagaagatctcctcgacggaagtcaagctagcagggagaactttggtgggcgaattgatggacttatagtatttctgaatggctgcgcaaagcgggagcaatttcgcattgtccacaaatctgaaatgagagtgttaggtaggatatcggagaagagtttggtacttaccctgcttgtacatgcaccctcagttcgttcacataaggtgcgatataagtacagccgacctcagctgcgagcacagcttgagccatgctgaacaaagtggttgctaaagtatgcacaccggctgcttcaagagtgtggcaggccatcattccttcccacgtactaggaatcttgatagagatgcgactgacgtcgaagccgggctggacataatggaacaactgcaaaattcctataaatgatctgatcaacatcggctcaattgagcaaaatcaatgacaatgagaaaagttaaacatacggaatgcattggccgcaatcttctccgatgagtatgagtagtaaggattaacctggacatgaacacgtccacgaatatgttttgccattccaacggccaatctaacagtctattaatcgatattagtcgacttctttaagcccatcaatgctacaatcgaagcatgacttaccgcaatctcgacagccaattcttcgaccgtggttgacgagtagttcggatgcagtttcttcgcatctgcctgtgccgccgcaatgacttcagcccgtgctggcttagaaagctcgccaagtgcaatagcctgagcggttagttgtaacctggttatgtagtatcttcgacctgcttacttggttggaagtacagtcctcgaatggacccagggttttggcgacttaaaaatagtcaattatctgaaaaagatcatataataatctctacgatgtggactcaccttcgtcgtctagcgtatcacagtcgatctgcgtgcgcgaacgcatatagtcgagacctgtctgtactgccatattcaatgtaggtagactagtaacgagacaagtagtcgagtaaagaaagggtgtctgatggagagaaaggaaaaacaaagcgaggaaatggtcatcccacttaccccaaccctatagtgcatttaatggggggttttccggggaaactccgcaggtggcacggatttgtcggcccgagtgacttgacactgcatcgagcactgcatgtctattgtagtgcatgggtaatgtgctaggaagtatgacagtatgagagctgggttaagttcagtgcaagtttatatgtcataacaattagtataactataacaaatcgagggatgaatgatgcttaaagtatcccaatcagacaatattcgcattgtataagataagaaggatatatgccgagagaaacgcctcgcgatgcaaagtggaaacccaccccgtataactatcaaactagatatcaaaaatcaaaatactctcttttgtttggcttctatttggcctggttagccaaccacgcctcatgtgccttcttctggcgttcccagtctttgcggagcttcttcgcccggctcttagtgatctcctcgccggtactatcgcgggtaggcatgccttcatcgtcccaggcgctgtactcgttggtacggaacatctccaggtggctcagtttgcccttctccgccttcttgagagcctcctgctccttcttcagcttttcagcctgcttttggagagcccgagtttccttctctgcccgcaccttaatcatctcttgggtgactggccggactagggcaggttggttctcccgatcttcgagggcgataccaacatcgaagaggtcgatgtctcgcacacggtcgcacagggacagaatatccttgccaatagaatcagatgactccaaagacaccaccttgtcacggaagttggagaaaagctcagcgtatggcttggcagattcagaggcctcttggggtgccgatgcttgggcaactgccgcctggatatccttggcggatattccagccttggaccgtgcggcttcacggagcgtgtcacgcatagccgacagagggtacaggtagggtttggcctcctcgggaatctcaataccagaccagccgatttcagtgctgtcagcagaggcggtgccgttaagaccgaagatgttcaccatggaggtaacccattgggctgcagcttggacatccttggagggcacggtagccttgtcggcaatattgaacttagagataagttccgaaatcgacgccatggcagcgggagtgttgaatgaatcacagagctgatcgtagaccgccttcttggcagcttccagatcagcagcaaaggtggtgtcggtgccggacgactggagagctgcagggtcgttcaccttgaggaaaaagttgttcaccttctcctcccatgagctgcctgtgtttatcaaatcctctgtgatctcaacgccatccttccagccacccaggaggaaaacaatgcgcagacttctcggcgaccagtctttgcgatcaagcgcttctcggatggtagtgaagttcttcaacgacttggacatcttggatccttggatggacagatggcccatgtgaaggaagtagttaacccattggtcattcttgtggtcaccgtgccagtatgcctcactctgggctagctcattgtcgtggtgcgggaaggcaagatcaatgccacctgagtgaatatccatatgtttgcctagcctggctgatgccatagctgagcattcgatgtgccaaccagggcgacccttgccccaggtacttgaccagcttggctcacctggcttcgacgacttccagagagcgaaatcggaagcaccacgcttctctgtcgttttgctggccaaagatccttcgccctctgcagccaacttgttgtccgaccggctccatggctcaagccgtgcgtacggatgacccgcagcttcgaaggcattgatatcaaagtataccgatccatcctttgtagcatatccgaagttattcttaacaatgcgatccacgaaggccgcaatctcatcaccgtattctgtcacgcgagtcaactcggtaggatcaagaacgttcaggtcccgcatatccttagtgaaccggtcctcatatctcttagtcaacttggtgaagatgctgtgatcgtccgcatcaaccaatgcgcccttcagggcatcgaggtaaggcaaaataagatcttgcgcgttcgaatagaacgactcagcaaagagagcagggtctgcactcgagctatcacgggcttccgcctgcacgattacttttgcggcagaagaagccgtcttgatgtgcatcttaaccttggcctcggcatcacctgccttgtcgtttcctggcaaagttccaccgttcaaaatagtcgcataggttttctcaacctcattctggtactgcgacggagggagttcggagtcgagcaagggaaggttcttctttaagtaggcgacgaaagcgcttttgacggtatctaggacctccgaggtaatcgtagggttggcggcgacaaattcattaaacaggtgttgttgtctggcgcggaggatgatctataagattggtgagtcaccgtgcttgaggctgtatacacagctccgagccataccttatcgtccacgtctgtaatgttcataacaaatttgacgtcaaacttgaagtagtcgcgcataattcgccggataatatcggtgctaacatagtttcgggcatgtccaagatgcgcgtcgtcgtaaacagtcggtccgcacgcgtaccatacaaccttcttgcccgcagggtcgatcgggatgaagggggtcttggacttggtcaacgagttccataccttcaatggaggcagttgcgcgtccgggctagcgaccggttgccgccatggcggctgctggcgagaagacatagaactgaaagaagtgcctgacaataagaaccgctgtttgaacggtggaaagaaacgaaaggaaagaagggcgggtcgggggaagagcataaagagggaaacaaaggcaatggagggggaggggctcttgtcaggaccagatcgagtcatccatcaactgcggactggctgtgattggcggcaacgggggatgggaggaccaagccctgagccctaattcgtggcccaatcaggcaataggcatgacagcctttttttcttggagagacagcgagttccaaccgcaagttagggattgtccgtaccaattatccgcgctgatatcgcccgccatgacttccccattccttacccggaacgccgtagcggatgcagatagtcttgccctcttgcaactccgtcgcgaccagatcattccgacgatcctccgcgaccatgacgatgagaaccaaggctattgggaaggcaaggtcaccaacacccgcttcggctcattcccacacagcactctgatcgggcaaccgtggggcgcgcagattgtcgcgtcaaaagttgatacaggctcgcgcggtcgcccatccaccaagcgcaaggccgaagagctcgatgctgagacaacaactggcgcagaggaggacaagaagcgaccatcattaagagcccccgtgtctgcggatagtgggttcctacacatcctcgccccgactcccgaagcgtggaccctgtctcttccacaccgcacgcaggtcgtctacaccccagactacagctacatcctccaccgactccgcgtacgaccggggtgtacagtcatcgaagccggagccggcagcggctcgttcacgcacgcctctgcacgcgccgttttcaacgggtatcccgggacagaagaagcaaccaaacggcgacgactggggaaggtatgcagtttcgaattccacgaagggcgcgcggccaaagtgcagcaagaacttaaagaccacggtctcgacgggattgtggaggctacacatcgcgacgtttacgaggacggattcctgctgggcgatcccaaaaccggcaaatcgcccaaggctaacgccatcttcctggatctccctgctccctggctcgcactgaaacatctcgtgcgaaatccgcccccggggcaggaatcagctctcgaccctgagtcacccgcttatatttgcacattctcgccctgtctcgagcaggcagagcgtacaatccgcactatgcgcaagctatcatggctcaatatttcaatggtagaagtcgctcagcgtcggcttgatgtcaagcgggatcgtgtcgggctagataccgagggcgttcgcggagctacaatgtttcctaagacggtcgaggaggcagttgcaaagctccgtagtgatgaacaacgtgccaagctcatccgggagaatcggatgaccaaaggccagccagattaccagccaattgcgaaggagacgccgttctataaagagaagaccgatgtccccgtttatgctcagggtcgtttgactcatcgatcggagccggacctcagaactcacacctcatacctggtctttgcgatcctgcctcgggcttggtctgaagaggaggagcaaaagtgccgggatcaatggccatccgccaaggtcgcgaagcccgataatgagccgaagacaagcaagaagcaaatgaagagagatgcggcagtggaacgggcaaggcttcgcgacgaacaaaagcaattggaagaaaagtcacagctagaatcgggagataagatcgaggaagaaaagttggaaaaggagagcaccgaggcatgaggatgaagataccagttgatttgatttgttagcataagattcatagccggattgtggtattgttgtctttgaagacattctacttcacacatatcatttactcaaaggctctttcatcattgaattgtacgcaatcctggagctaggttggtcgtcaactcctccgacctcaaaccagcatttgcaaatccttacagaggcatactttagcggcaagtatgaattcatgggcgcatcttgactgaagcagctggtatgagaagttttgcccgagaagcagccgtcttgcaggccacctggagacgaacatagatcacgatgataaacaagcagcgagaatgagtactacaagggatcagaaacacaaagaaggcaacgctcatatgtaattctctatgggacaaaaatgctatcaaggccccttctaggtaatggaatcgtgaaatgcaacaagcgaaatgaccatgagtagatggtatgaacaggaatataggagctctcagaggttattttcagctctgaacttgtcccaggcttcatttagggttccaaacacagatccagcaatcatacgctgctcagtggtggcactggtagagatctaatatggaacgttagtatataatctgccaataccacctaagaaggagtaaacataccttatcagggtgcaccttggaaatccccttcatgtactgaatcttaaccttattcggcagcaccagctccgacaagccaatcttcttccacccagcctcgggccatagcacagagtctaagctacccagcagcgcacgcaaattgtcttgcttgccacttttccaggtagagattttcgcgtcgacgctctcggcaagagcaaacttctcttcgtcggcacgctcagccgcctggttggcttgtcgcagacggctgactgcttcaaagtccgtcccggatgccgacgtggccgtgagaccggacataaccgaggccttcttaggcggaggtgaaggccgatttctagcaggggctgtgggtttagattggggcttgttgataccagccgctttctcgcaacggtttcggccttggatgctcgtgctgccaccgtgaccagactctacagccagcttccacgcctgcgctgcatcgttccagtgctctagttgctcaagggcttcggctttacgcatcaaagccttgccgaagaagtctttcataggcttaggtggttccccggtgcaaagatcgattacttccgattcgcccttagatgggccaataaatgttaaaatgatgtcggcgtcatcaatggcggacttgggttcaccgatcttcagggccgtcattgcacgattgctgcggatgataatagtgataggatgtttgtcaggcagcattccaagagcagtggaaaagctctgatgggcttccgcgtagtcgcctcttttgtatgagtctgcggcctttccgcggtgccggtgtgtcgattgaagcgcctcttgggatacaggtggaatagaccgtgttggggctttggggcgtacaggaatggaagctgagcgtgtcgtaggcatggcagagggaggaggctttgaacgactagctgaaggagcgggggaatcaaagagatcgacagtcggctcagaaggcggcggtggcgcctggggtcgcttgcgtctcgcaggactaacatatgcttgagccgtctgctcttcatccttaaaccgtgaaactcgagatttaggatcctgagagcttggtcgggatggacgttggaggaagttgggttgttgccttggctggacagcaccaggggactgttgagtacgaggaggctggcttctcggctcggggtggtgggtttcacggtgacgaggtttctgaggccgaccatcaccagactcaagaagaagcgcttcattggtgaaatcctgctgctctcgttgtgattgagccggctgatcacgacgatctggacgctgcggctgcagaggttcatcttgtggcgaggatccatctctcatccaacgcggttggctggggtcatgctcggcgttaaattcgtttaccgcttgttggaatttcttgctgccagtcttccaaagcgagccggctgatttcaacagggtattaccaaattgggagactaactgcgcaggatctttgtccgctgatgccggactccgtctgtcctgacgtgatcgagattctgacatttcttctctcatccacgaaggcctgtcgcggttgcgactatcgctccttgcagcgcgatcagtagaatgagttgtactgggatgcccttcagtcttctgccgagactcggcatgggcctgggtgagaagccaaccaacagcagcctgcacgtcggtcccggactcggtggtattcaaagcccggcgagctttatccgcggggaatcccatatccaccaactccgcaatagcccggtcgacctcgttggaaggcataggagatgcatcttggtctcgtccttgagttgagggtgtggcagatttaggaggcggttcggggtgagggatatctgatatcggcttcccaagcaaaccaaggaaatcatcatcgtcgccttgttgaggctgaggagcgggagcggatttcggcttcaattgattgagaccgaatggatcatcgtcatcaaaggcgtccatcccccccgtgttgtcctgcatggaaatccccccattggaaggttctgagcgactgttcaagtcgattcgaggcgacgatctcgaggaggtggggattgggaaatgcgtcgatgcgtccaccggtgcggcagaattgaaggcagccaggagatcctcatcgtccgcgggcggaggtgcagatcgaggagcaggtatagatgcggggctccgcgtgcgtccttcgaaattgtcccagaattgattgttctggcctccgtattgcgattcgaatcgactgcgattttcggcttccttcttagccttttcctcctgcaagcgcttctgctgttctataagagataggttcttgttcccggcggaagaattgaatgaaaccaggttcgcgaagctatctccggcgggagtagcgggctttggtgagcttgagcggttcgaggtcgcagataacggtgtggacctgccggagccaccatttgatggtatacttgggtacaaatacccagagctcattggcggtggtttgcttgtgtttgagtcggaggaccaactcaagccatttagatcctccatggtgagtgagcgtcgcaaagaatgaaggtgacgtctggtgggttcgaatgaggattaggtcccagaagcgggatgaaggttttccataatctcaccagctcacaatatataaaagaagcccaacgcggtttcaatgatcgtttgctgctatcaagcagatgcggaacagttgccccctgcatgtgggggatccggaccgcattgaggccagcacgtgattatacatttccttgtctgaggaaatagttatcagttcactcgtctggctattcaatgtcttgagagtgaggttaaacatctcagtaatcaattgcctctaacatgaactaacctagtccaaggtgtatgtgatgacgtcgatgtgagagatatccagtccacagaccttcaactgagcatcttcttggtactacgttttgatttctcaacaactcagtgatcactcaaatcgccctcagtccctaaaacaacctgaggactattaacggatattgccatggccgcttcagccaactgaagtaaacgaacccggtgaaaccgatggttaaatggaaaagaaacaacctcacgatacacatacaacggatgaggaatatatatgtctctatgcataaatgtcaccactgactcaaaacaccccttattaatggaacctgtggcttcattggcctcgttctgatttgttggttttcgtttgagtggtctaatacgtaatgtctgcttcgttctatcttgctatgtatgtcgtgctgatggatatatttgcaggtttgatccccggcaggcgcccttgaatcaccctcagaggtaatggcaaagagaacaaggaggaggaccaggagaggaggtgccagagtcgttgattgcacctgtgggctaatgagcacgattaactcgagaagcacttgtggaaagtgtaggtcttggaggaaatacgtatacatactaatcaagggtgtctacctctacggggtatcccacaaggcccagtcatgaaatagtccagaccattctagagggactgaaaaagaatccaaaagcttacactgtggagaccatcaatattgattggtaaggctatccctgtaaaatgcagtaaaaggttcacaaaagcaggcgtgcttcgtcctgaaaccagtgcttagggtttccacaatgcaaccttttaggtcttttctcggtgcttacttgcaggctgcaagtccactagagttcgaaaatatgccaatgaccactcaatcaactactccgtatatcctacgaaatacctgctgacagtctccaaatcggcaaaaagacgaatcaatagtcgagaaaatcatcgaggcccgaatctaaaaacgctcgacctataggatctaggcatatttgtagggccgaagcctagctaaactatcactcaatcattgaaccaagaatcaggggatcacccggtatccaagactattagctgtagacggggcatgtggtatccatttcttctacttttgggccaacgcacatcctatcccaatgtgggatgcgcaatacttcagcctagaactattttgtcttttctggaaacttcaatcaggggtagttggagacggaaagacccaaataactattccgtaaatggtagcagacatctactcatgttctttcttggtcgtatagatctactattgggtggcatttctacctgccaaactccgttagcttgcgcgctaatgcatgaagctttgctcaattggtgattttcgctaaactctaaacgatttaacgtcatggtttagcggatgatggagcccctttttgacgctttcatggaagacattagtccgttcggtgcttgattgtgtcagtggcgcaattacagcggcaattcagcctccatgtcagctcttggtagaaccatacagagtactccttgggaaattttataggtgcgaatcaaaaagtagcaataagcagtggctgactaagatcaagtgaggttatgtccactcgacgaagatcatcatctcaagcgaatcagacaaagcactgtatgctttgtggctgcaggcaaccaacttggtatgtgatatgatagcgacctcacggccccttcctgaagtctgcggtgtcatactccactagaattggctgctgcacaatatcctgtgggagattccacctgcctaccccggcatcccaagcttctgtctcccctttctggtgcccagtgacaaaagtgcaatatagatctgggtctccaaagaccatgattccgcctccaattcggacatcatcgagtgcgtaattcagggaatccgaatcaaatatagattgcgtcaattctgcgcttgcaattggtctgaaattctacaaatgttttcattagcaaaggcggttcaagcatattctttgccctgaaacagtatcccaggggtatgaggagaatgggcaatctatacctgttcggcacccccgcctggggcgaaaaacctcctaacagtaatgtaccaacgctcttctggtatttttacgtcgtatcccgtgaatctgatatgtgctggtaatctcattttcttggcatgaataacgagagtctagtcggcttccatcgtaggaaggtctgtaggtataggtaatatcccaggttgactcgtgtcatcgacgttcttcaagaactagcctcgctggctaagggaaagctgcttcagtttatcactgtcctagctggagatagaacagaatgaatgatatcgtatcatcctggaacaacacgaaacttgtagagtaggatccagaaacaaaatttcttgtcagaatcgtgactactccgttggggatgaagaaggtcagaagggaatgacttctagatcattctgaatcacgtatgcagggtgatcgatagtcttgacaagttcatcgagtcctgctagccaatagatactagcgtggttgagattagctgctaagctcccatacaagaaaagaagaaaacttactaagctggccatttttgtcaagatgttcttgagtattcaccgggatcataatcccagggtatccttcatcgagagtccatacagggcggaacccgtgcttcgcaaggttgcgatggttgcatactcccgagctagaacggcatcacctttgtcgtaatcagaatctgaagtatccaactcttggtcggggtcttcgtaccttgtatgcttgatggaaggtggattaagtctgtatatatgtgtctggaggagatgaagaaggcgagagtgagaagttagagtgtgagaagtaagagtacaagataagggaagtagcaaacaccatccgatcatggcaccttgaaaggaagtgatgtttgaccatggtagctactcagtgaatccatcagtaatctcacgtttgctaataaatgtactatctaggtatggttgccaaagctaagcttgagtggatgagtggatttcgggaattccgactcttccgccagtcgggaaattacgaagtcctctctttagcgaaatttgttttataatttcagctctcactttagttttgttttttctcgcttgctacaggaccgaaaatgacagcaaaaagacagtaaaaaagatgcatgaagaatacacctacgttgtagaaagaatattaaagatgccgatgacaaggccaatcaggtcacaccttattagacttaattccatctgccgtacatacggagtactccgtactattgccaaagactaggcccacacagggatcttcattggcttgaggatatactcaacggaagaatatttagtaggtgggtataccgtctttgcgggaccgcgttccgaatccggtacgatgtatccaatcgatatgtaatctagaccagaggtcacgaggtcacattgtccaacctcgggaaggaatgtgatcgtgtattatgtaatctggttttttggaatggcagaatcgcggctgaaaaggcggaataaaggattgagccaatagaagtatagcaatcacgtgggcggtaggcttaaaaatacgtccgagagtaaagtttctaaaaccgagggggctaagcctaattcagaagccttggtactctttatggtcaaaagtccaggagcacgaataatccttcgaaagtgatcgttagaaaaagtggggtgattttaacggggtttggcttgattattatattcatctcctgggcgaaacctgcatcatcgtggaaccaaatggacattgagatactgttactccgtagagtaaggtaagagtgttggaatggtactcgtatatgcttgtattgagactatacatagtattcaagtagaggatgtttgcggtaaaaaggaaagtcggaactccgctttttcacagcagcggaaccactcgggaggccgagccgcgcggtagcgaatggaaatccaatcggtggatcgcagtgtcttgcccctgactttcagggcttggacaggtatggcttagtcagtgcgcacaatgctcggacctgtcttaatattgatgtaggtaggatatccttcatactgatgatactctgccagccctcattcttaagaaaaagaagaatgaaaccaaaataatccagatttaagaagatcccaaacgaaaaacagagttaagctgaaacgacccaacagagtggccaggcccgtgcttcccgttagctgggtccttgggtgcattgcggtataaatggggggtaaggggggcttgatggtccggagatgaggcccctaataagtaaataagagtcaagacaatcagactgatcaaggattccaacatcaaagttaatgatccttcgcatagcctgcacggtccactgttctacaagtacggagtacaacatagtaccatgcagaaagaacctgggcctggaatactttacacagacgtccagatattatgtcaaggaggggcagattagggcagattaccaggtgaaacctggtaatctaggcttgagagacgttgtctatggagtaggttcatactatatattaggaagcgacaccttcctcttctagctgataggcgtagtgtgctgaccaggaggcaacatcgaaccgaatcaattctccggttttcggtgtgcgttgtactccccagcacttttttgggaacccccctaactcaaccaccgtctattattaacactcttaattgccaaacccataaaatctccgaacatgcgctcgtttagatatataccaagtgggtttgccctgccgcatcgggtaagccgtgtctttttcttctcgtttctttttttcttctttttttctctcgaacggtacgctagtccgtgcatttccgcgtgcgttccacggattcgccctaaacgtacgttgtatttggtcgttcccctaatagggcatggtctgatcgatgcatgtgagctagcgatctatacacgtaccacccagtggcgcctcggaaccggaagtgatttgatattggcattcctctttatccattcgcctcggccctgattcgctgcccccttgcacaagtcaaatgatagtccgttctcttgctttccgactggtcccctcctcctgattccccatacatacggcaatcgatcctaatctgccctcgggaaatatgtacgcattccgtactctacacaagggctttgtgtgctactgattatgctgttgttaatatgttgtatatgggttgtacggaaggaaatgttcggtactccatagttacccccgtagttctaaaagcaaatcagctactccgtagtctgggcgtatccggtaccgcccttcacatactaaagtaccagttgtggattgtatctggtaccttcccaagcttccgctctcgttctcttactcgattcagacggcgccggactttggactttgccagactcgcccctaaatcgactccataaatattcgaattcgaatattcaaattattaatgcccggacgtctagcccgtgctaagatgacccttcgcgagagctgtccacgccccataaaaaaaaaacaataagtattttacctctttggcctgctttggcctgctttgcctatttttacttagtctaccctagagcctttattatgcgatgttaaaaaaaataaaaataagaaaaacatcacattcagatgtcacttccccctctttgtaaactccttatccgaactacattctcttctccctgcaatccctccccgttgccccctttcaaccctcgacaagcctggggtgaacctcccaactcgataccatggggttattcaagcgcaaagattccaagaactccattcaaagcgataccgagaatgatcccatatcaatcaacagcgctcgtacatcacatacatccctgagatcgccaaggtacaagggaactggcccgccatcctcgatcccggaactccctatcgccagacccccagatccagcattggacccggccgcatatctacggagcatccatgccgtgcgcgaacgctccaacatcattctgaaaaaggccaaaaagaaccaactgcaccatttcgacgtcgacatgagcaaattcgaagctaccgcctcttacgtcgtctccatcatcaaggtagagaaccaaacgactcgatcctgtgagttttgcgctaacgtgtattcccaaccagcgagattatgcgccagattatgagaacattcccccgcatggtcgctggcagcacttcgatgtcggcggcagaccgcgtatcaaccagcttctccagtcctggcccagtcgcattgatgcgcaggagcgcacccgccgtttgattgatctgtttgtcgtgtccgtgctgctcgacgctggcgccgggaacgagtggtcgtaccggtccaaggagtctggtaaagtcttctcgcgcagtgagggcttggccgtggccagtttggagatgttcaagtcggggcttttcagtagcgatccgacggagccatgtcaggtggatggcgcaggattaaaaaaaattacggtcgaggtgcttgccaaggcgatgcagcattctgatgagaatccgttggccggtattgaaggccgcacgggcttgttggtacggctctccgaggcacttaacaatcaagacttcttcggtgtggatgctagaccgggaaatatgctaggtgaggcgatctggtggtgtgtgtttgaacagctactaatctttcagattatcttctcggtcatccgtcaaccctggcttcttccgtacctattgttccgatcaccactttgtggtccgtgcttatggatgggttttctcccatctggccggaatcacggacgcagattgatggagtatctattggagatgcttggaagtgctcggatctccccgattgtcctcctgcaaagcagtgggagagcattgctccatttcacaagctaacccaatggctatgctactcgatcatggttccaatgtcaaaactgatgctcatccacttcgccgggagcgacctcctaacaggccttccggaatatcgaaacggaggcctgcttatcgacctgggactcatgaccttgaaaccggatgatatgcagcgtggaatcgatgcatataaagagaatgctcagatcaagggtcagccaagtgtcgaagtggcaccgctcttctgcgccgacgacgatgtaattgtcgaatggcgagccgcgactgtcgggttcctggatgagctcctagacgaggtcaacgctcagctagggcttaagggctcggacgagccattaacactagcacaaatgcttgaggctggcacctggaaggtaagcaactcaaggattctccagttcgataaattctaacaagaaccagggtggtcgcgagattgcggaagtttcgagaccaaacaccaaggaacctcctatcatgatacgatctgacggcactgtcttctaataccctctattcccattttaattgcggctttgatacctgatatcttcgtccatcatttggttttgctatttgggacgagctttttgatgaaatgaactcttcatgaccgaataccttcatacctatacttcacgtttggcttttctacatttacttcaattcccttacttcctacttcctacttcctttattccacctttccttctctcctctctccttctctttccttctccttccctttttccttctttttcctaccttgagccttctctcttttccctctctatttgaggctattcatcagatttaccactggttttgggcggcttatttcatactccatctcaccttttttttttctctctacttgacaccctcatgttgataaaagccatttgaccatagaacaaagatctatgattttcggagacccatgagatgtcgtcatcccgtaacctcggcccaagctcaaatagaacaaacagtgccaacagtgacagtgccagtgccagtgcacgattgcgaggtctcatcagatcagtaacttgatgaaaactttagagtagatagattgctggcatcgtcttttcttcctatctcatcccacaatctatcccaacactttagaacatcctgagatcacgtgctcgggacagcattgttccatctccgcattagaagttggagctcacctgtcacctttccttatcttgctctctcgtcctcaatcccgttgtcaaggcagaaaaatgataatattggactcctaaccggaactcgataccattgcacctgactgaccctgtgaaggcactgagttgccctccagatcgacccgagttgcccccgcaagagcggggcattcagctcaacggcagcgccacgaacatctaacaccatggatgctcggaagaagaagagaaaggtgctcctgatgggcaagagtggatcggggaagtcgtccatgcgctcaattatcttcagcaactatgtcgcaaaggatgtgcggcgtctaggtgctacgattgatgtggagcacagccacgtcaagttcatgggtaacctcacattgaatctgtgggattgcggagggtgagtaatgcgtactccttgcaatccgggaggcatttcactaacaccgaggttttccagacaagatgcctttatggaaacctatctggcctcgcagcgcggcaacatcttctccgacgtcgcagtcctcatctacgtcttcgacatcgagtcccgagaagttgagcgcgatctcgacacctaccacgcgataatcgaagcgctgagcgagttcagcccaaacgcctacgtcttctgcctcgtgcacaagatggatctaatccaagccgagcaccgacagcgcatctatgacgagcgctccgccgtaatccgcagccgatctggcgatttccgcgtcgacactttcgccagtagcatctgggaccaatcgctgtacaaagcctgggccggaattgtgcacaagctcatcccgaacctaatcgtcatcgagcgcttcctaaccgccttcgcgaagaaaatcaacgccgaagaagtcatcctcttcgagcgctcgactttcctcaccgtgacctcggtgacctctgaggtcggcgagctgaatccgatttacgaccgccacgagcgtctctcgaatatcatgaaggcattcaagcactgcgccgcacggaacaccctcacaacaccggcttcggcgggcttcgtcgtcatgcatactaaaacaccccagtttaatatcttcctcggccgcttcacggataacacctatatcttccttgttgtacctcccggcgaggcttcgtacaactgcgctgtgctcaacacaatgcttgcccgcgagggattctcgaaagcagcggctggcagtggcggcggcgatggcttccctcttcctccaccagaaacggcagatgatcatgcgaatgggtatgggtatgggtatgggaatgggtatggacatgggtatggcaatcccacgtaaaatgggtagttgatttgccattgggtctggctttgtatagctacataactactaggggatgttgtctttcccttccccccttcccccttacctcccttttggttttttttgttccttgacttctgaggatttatgacaaaatacagcaggcgctgaatgatggcgttatggattaatgttttcttcttctttctttcttttcaactttctgagaattgagataccctgtgggatttttttgtacttttttttttctaaaaatatcatgaaaaattacccaggtattctgcaaactattgagaaagctcttgagttttatataaaatctatgtttttcttccccattggtgatggtgatgtatatatgcttgacgttgtagatcatgcaatcggccttgtttcaaatggaactgccatgttaaaaggaatacaggcagcctgataccaatgtttctatatcaattccctgctgtatactgcatagaagccaaatcgctacaataatgacaacaagaccttgatcattcatggcatttacttcatacaataccgcagtgacataacatttcatccgaaccatctatattcctagcatccgatgcagaagcgaaacgcataagagaagaataaaaacatgggagggatttgattatctatcggaccggccggcctcaacggagaaggatgaaaaaaaaggtgggaacaaaaagataactcggacaagaagggcatgaacggctgtacaaaatcaatcatccagagagcttgaacgtttttcattggatttctggcatgcgcatggcaatgtcgcccgactgtgtgatgtatcgcacccaggggagagaggggtattgcagctgtgggagttgattgttagtgatagattataagaatccactgatgggaaagacttacctttggttcggtgatcttcagatatcgcacttggatgccgctggtcgtgaaataggggatctcgaacttgacgttgatgggacgtttcgacttgcctacgccgccggctccgcccatgctgcctccgaacccaccggtcataccgccgccgcgctcgtcgtcacccttgacagagggtagacctagctctgcgcgcatgaggaattccttgccgccgccgaattgcttgatcttccagatgatggcggacttctcgggagcgtagtgcacggttccgatatttgtgcggaagcgcggggagtcggcgtcttcggggacggggacgagaatctccacgttgttggcggtactgcggcgtttgaattgggctttggcctgtcgtgaaatactggttagggattgatatttggtaaactgggtgggaatgttaccttgagcatatattcaattcgggatcccgagtgcgattcaaccacgcactccacccagatcaacggcttcacttgtgtgttcagtcggtagctcatgagctcgaattcgccgtccggagggatgaaactgattgtgcggtcattctcgaagcgcgaaagtcggacacactggtggaacttcacgtcctccatctcgaccgacttgcctcgtgtagcacgacccgtggtctcgaacatggctttgtcgttcaagcccaatcgcaactctggcataccactcagatagcacttcatcttgacagcgcccagaatctcagagcgcaggacgtttccatttgctgaaacgagaagattgagagactcgaccacgtcgaggaagacttcgtttttgcggtagcgtatcccctcgctgcgccaggagacagcatttgtgacagcgatgggtggccgtgcttggacatccagcttgtgtgactcttgggtgatgtatctggtcatagcgcaggtctgttagttatgctgtttcaccaccacccccgccgcaccagacccagctgcttactcttgtagaatcttgctctctgttgtctgcgggtatccaaaatccatcatctcatccagtaattcgtaaatgacgacgaagttatcccgaatactctcctcctccaataccttgaaatattcggtgaagacctccaccagcttgtggaggaagagtagaatttcggtggcatttgtgtttcgtttggtcaatgcgaggatatagaggttgctgtggcggatatagaggtactagacgaaaacacccctgtgtcagtacgtgggagcgcacaataggagacactcaggagtgggcgtggtcagggcaatgcccaggctcggtgggacgcacattgattccctcgtgagagaaacagggaggaactgctgagctttcttcttcggcatcactgaggaggatagggaatttctcgactgcggacatgggaatatctccgcggtaattgcgggccagtagggtctatagatggtcagtgggggcttgtccctggacgcattgacgattttcccggcagggggtcgcatcgccctgttctgcacagtttccaatagcctaccttgcccttgaggtcgaggaagaagagtgccgacgccatgacgtgtcaatgggggtaaatagatgacgggagaagtggtgatgatctggtctcttgagatgggggtgcgaaagcaaaaaaataacaaagccaccttatgcgcctactgcagcattgtcaataaagcagtaagaacaaatagaatagcagcagatgaggtgagaaatgaaaggagcagatcagcggaggattgttggcgatgcccgcatgtcccaggccggagatagacgccaagcccaaagcggactagcgtagaaaatcacacataaaagcccgtcgcgcacttttttatttcttctttcttcaacgctcccaatagacagttcaaggcagtataaagtcctttgtgattttctacagctactccggcattctgtcggagtgctatagtgttttgattactaccttgcgatacagtggtgcggagactacgatcttacgagggttccataagagctggccgagtactttctctgttactcgggcggcgtcagaggaaccgtacatttctataacttcaaatgaattttttataaatcgaatcttccttgtaaattgtcctaggtgcttattttgattgtaatctgctccattcaatctgcaagtgcaactctttcaagtggtatttggcagtagtctgagaaatcaaacgatataaaaaaaacaagtctgtttagaagtacatgtacaatcgtagaggttccccgattgagaagttcactccccagtcaacctaccaccgatggaaatatcaaacaagataacgccctgaaaatgctccaaaggagaccaataccccaagcccaagtcttggacccttacgagaccgacttgagtcctaggggttcaagtatccgctcacgagccaccttggtggcaacaactcctcccttctctagcgaaacagcgccaacgatagcgtacatggtatgcgcgagaacgagctcaataccggaggcacggaggtcgttaggctgggatcttcgttagctggtgatcaagaacaccaaagactaggatggagacataccattctgggactccatctgagaaccttctgtaactcgtacttgtttgcaagctcagcgagcttcgaccgctcggtgaggatcttcttggtctcaccagagaggttgttcaatccatccagagccgggtgggtgaaaggcacgcgaccatactcgtccttcttcggtgcggcacctgtgtacggagaatcctgtgccaaagccagcgatgcttgcagctgcacaatgcgttttcccaggaaggccagtcgatcgttgaatccgcgacgcccttggtcgaaactcttatgcgtcactgccaaccacttggtctcgtccgagaggagtttgtcgccgccattgccgaacaatcggatgtagaatcggtctagcaatagcggatctgcattgacgtggaaggtcgggcgcttggagtcaaggtgcagactgaacggggcctttgccgccgcgggagtgtaggaccaccggggcttttcttgttgactggactcctccgatgtagaggtcgcgaagttgcggcatgggatgactcccgcaattgggcgaacggcgaatttggatgcagcgcaggcggtcctggccgctcgagaagaaaggttcaaagacatggggtcggtggtctgcgtgtctactcggagttgatcgaacggaaagcaaagaattcggcctgggcggtgtgatactgccggtcatcaagtacccagacccatgagttctatgttcactgttgctcatgtctgtttttcatgactgcaattcttacaaaaacttgttgctgaacttaattctgttcaattgccatctcgccggtttgacatgcagttaaacaaccttggaagccggaggcaaccgggaccttcaccgctgctgcgcggtatcttctgctcgaatgcttgaccttgtgcaccggatccgaagcgactaacgctgattccggctgttgcagcctaccacaggccagcatggctatgacagttggaggtggaacacacacaaacttccgactctgccatgcctcgatgcatatatgatcaaaacggcatatgactcacattaattaagcaccttggaagcctatgtggaacattttagcggtcaggctatggagcttctgaatgatgcttcgatatactccataccgctagtcgcgggccaaatccagcacacataggctttcgtttagcttaggcacggcccgctatgatacacgatgtgtatttaccccagctgctgttgctagcagctttgactcatgttttctgcatgtgcccattgaaagttggggttcgactgggtgtagatggtctcgcggatatccccactactttgtccagcaacatccttctctggataatatcgctattatatgaaccaataggaaacctgtgctctctcaccttataggttataggtccaatagtgctgccaggtaacatcatctgactggctgacgggcgacgcaaccgaccatgagcgcggcccaaagatcagggacacaggtctccagccgctgcagagaaacggtgggaaatccaaaagaaaagaacagaaccatacggaaggagctaggcgatcaagaaacattcaaaagaaggttcggtaaccttctcggaacacagtcgttccgcgaaacctgccgggtatgcagaggccatagctacctggagcacggggcagtgtttttgggcctgcctggttgcggatgtatgcagctggaaagctcagctgaggcacagtggttggctcgaacggcccatgcctctctggactgcggaataacggccctgctgtatgctgtatcatcgtagcctgagctcgtcccctggattaggcaagagactgtcatgtaccgaaggcaaaacatgatccacgtgtattggcgttcggtcttatttggccgtgctccataggtacgcttcctttttctcatattgcctcttatggtcggtggaagcttctacgacttgcatatccattattcgcacgactaagcaagttcgcaacccacaatgggcattgtgggagctccgataaaaggaccgggatatgttaatgacagtgcctttgcccatcttcgaaaggtcctaagtttgaaagacacaagaacacaagctcctcaatgtttgatggcctcgaattcatacttactttttactaaaacagcagacggctgttcaacccaaacattattactaaaagtattgaataagtagccaacggcaaatcatctagagcgaacccagtgaaacagaatccctcaacagactgcaggaatccgaagggtcagaccgctggtggaactctgccgtctgcaggcagttgatccgggggagaaggatttatactcgttcattgcggacattaagttgtatactatttgctttttgaggaaagataatagggcaaagtggatctacttccaacttcctgtcgatgcttgcttccggggaaatgaaaagaaacaaaaatataatactcacgatagcgggtgtgactgcctgcgggtactatctaatggtttatacatcaagtcttcacacgggcccttgcagactctaccaagatattgatcttcacggatagtcatccccaaggtccacggatagcaacgggaatatgaccatcgccaaacggctttttgtcttgatccttgatcgggatgttcgacagggtagcggtgtgcgactcatatcgatggcgacctatgaccccagctaaacttgagtcatttaaatagacatggaccagtccggatttcaggtcatcttcctttaaaacaccagagttctttgtcttcgtccttttcccgtgtttcgttgcagagctatacttcctttctctgtcaaccctgacttgtgtgctccatttcactacaaccacactcatttcgtgcatttcaaacatccaaatggctttcaaccctgcttttgcccatggcttccagcccacccctgcatcgccggcccagacatgctatacatttacgggaagcgacccggcttgtgatcactccgtgcaagatcctccttcaccccgacctttccctcccaaccctcctcctagtcctgcttagatggcagttgcttgggttttatttgcttggcgttgaggcgacacgggacaataggtgagtgttgtctaacgcagccatattctagatccgcaagatatacaacggccaagtcacggagatctgagtgaatactaacttacttacagatcataccccaacgcattttaactgcggtctgacggggatatgcattgatggcgactacgactgggataccataatacgatgtgtatcggtgctggtacaagaagaattgcgggtggaaaatggcaaagtcacgaggcacactggaccctaaggggactgcatgtgtgagagtgagagtgaagatggccctcgagtgacgggttagtgacgggttagtgacgggtttacatactcgatgtgtttttctcatccgcatatccattgtctggcaagatagcttaatggaactacatcaagtgggaccgattgcattttcacactgatacatgacatctagaagtaggcgagaagagcatctagactttcacaactcaaaattgacatactcgtatattcagatcgtgcaagtaatctagcccaacccgaacgcaatctccaattaaaacagctgaacagacgaaaaagaatcagcgtcttttgagcttgcgccaagtgacccgattcgtgtatattttagaaaatcaatttagtaacacatagggaaattcggaggtatgggatacggaaacatttaaatcaaagcaagaccaacagcactggcaacgctgagaccaatcacagtccagccagtcttgatgataacagggttagtgagaccacggccgagatcccacatcaagtggcggataccgttcatgcagtggtaggtgaaaggaagggccagggtagtcttcagggcgaccttggccgcgaaagggagggcacccatggcagcgaccatggaggcagactcgatgtgccatccgagagcgggagaggcaaggtaggcagtagcccaaaggtagagggtgccggagagagccacaccagtgatacggtggagggaactaccgatccagccgatctggggcctgtagatgctaagatgaggggcaacaggacggcgaagacgctgctggacgaggatctcgttggggtcctgggtgtttgaagtgacttgtctatagaccatattccctggttagtatggacttttggagattgcggatgacgtaggcattcggcatgtgcttgattcgaagacgagcgaagcaattaaagcttgtcgtttaagcgctgtataactgaccttgtctgaatgttcttgctgagggcaacggccacaggcgaagcgcccatcatggacgaccgcatagcgagcggttgctggacggcaactgtccgggataagttagatcgcagattcggacaaggtaggaattgggctagacatacgccgtcgcagcgattgttgggcaagcttctgggagaacattgtgattgcagagttgagattgttctgtttgatcaggatagaaatcccaaatggctcgcgatggctcggaatggacggacgacctcgggtacgggagtcttaagtcacgggacttgcatccggtcgacagcggctgccaatcagatccggtctattaccagccggaatatccttattcccgacgcgctaccgtggtcatgtgactgctcgcctgttttcccactttcttcctttcttccgtccgctgctctctcttctttctcttcctcaagagtctccgctcacgtcgtctactggtcttggctgggatgatgtcgtcgtgttaagctttccctcactgactgcggctttctgtcgtggacgccgagggatctagaggctctcagaaggagagtcccgtcgttaatcgcccgttccactctaccaatgaggggaaggggtttcatattcagggatacatactacatgtatcacatccattgatgtttgtagatcgccaggtttttcggacgcagttggtttgaaatgtcactgcaactgttgaaaagcctgcattcgctgtggagaagcatccagccgaggcatttatgtttgcacggttgctatattcactcgagttatgcagttatattcaattcataatggacaattgaaacaatgatcttacctcttacatgcgtctgttcgtaaattgtcgtcggttgtaaactttcgaggttggagatgaagctatacacggttggttccttgtcacatgtcaaaggtcaaccatggcatatattctctcccttcttaactaggtctgggcttgatattcgatctgcgggctaatactcacaagtagataaagggctctagacctcctagcgacatatgaatatccctttgttcagtaatcaaaattgcagatgcaacctcggcacctcggaccttccccacaagtaaagagatccgccgcgtgctgacatccgtttattatctgttcaaaaactcgagaatctgcttgactctgtattttccgaagcgatcaaggaagcgatcatactcatgttagtatatatggtccctattcgggttttatcttctttccttggaagttactgactccgcatcagattagataccccgacttaacaagatgcctttcaacacagccttgacgcgaaagctcggtattcgaggtgcgctatgaattcattattctgcaaatatcaccagctgctgatcacagatatagtgcccgtcgtgcagggtggtatgcaatgggttggatacgctgagctggcctcggctgttagcaacgctggcggacttggaattgtatgtttactcttcaatgaaagccctaatttaatacagtactaacaatacaatccagctcacagctctcacccaaccaacccccgaagacctccgcaaagaaatccgcagatgtcgcaccatgaccaaataccccttcggagtaaatctaaccctcctccccgccattgttccccccgattacagtgcctacgcccaagtaattatcgacgaaggagtcaagattgtcgagactgccggtaacaaccccggccccgtcatcacccagctgaaaaaggccggcatcatcgtcctacacaagtgcacgaccatccgccatgccaagtccgccgtcaagctcggcgtggactttctttctatcgacggctttgagtgtgccggccacgtcggtgagcacgacatcaccaattttatccttttgagccgtgcgcgccaggaactcaagattccgttcatcgcctctggtggattcgccgatggccagggtcttgctgctgccctggcgctcggcgctgagggtatcaacatgggtactcgctttatgagcactgttgaagccccaatccaccagaaggtcaaggaggctatcgtcgcggcacaggagactgatactgcgcttgtgctgcgtcggtggaagaatacctcccgcctgttcgctaacaaggtggctaaggatgcattgaagattgagcaggagagtaagactggcgagttcagcgaggttgggccctatgttagtggcaagcggggtcgtcaagtcttcattaacggtgacgttgatttcggcgtaagttaattgcaaaattatgtttcatgtgcattcgctgactctttcgttatacaggtgtggactgccggtcaggttattggcttgattcacgacatcccaacttgcgaggtcctgctcacccggatcgagaaggaggccgtggaggcgatgactcggaccaggtctttgtttatcgatgctccctccagcaagctttgaggggttttatgttacagatgtggtctcaggcgtatttagctttttattgtttagaaagatctaacagaatcattttgggattttggtgatggcccggctttgtacatttgcgttttgaatagtacttccaggctatcttcacttcacgctcgtcgatccacgtcatttccggcgctgaaataagagctacccactctccacaggggcttggtcaacggtcgcattcccgagcgagggtccgtgatattgcatcaaggatctgcaagcacgcagatccgcggacactcgggcattcctccaacgccaacctccaacaataatgatccaacgcgatagcgaagcttttgtccaagcctactagatgaaattgaaaaagaaagaatgatattttcttcaaagcccgcgtgtttccatgtgagatcaaaaaaagagtggagacatccttgcatgcagtcgatcctcgggggaatgcttgaatcttctacgtttccggctctgaccattggttctgtctcagttgtagcatcgatttctcgactatgcatgatatcattcatcatgagtggtccccttaccaccaacttacaccgtgatgcttagtattctcactgtagatcgtgctgtttagagcagggttagaatatctcgaagtaaacgtagctgtacttgaggttagtatacgcaatccaacagcccgagcaagttgatcaaatcccattgcgtttcacagcagccggtacaaaccagcattaccccgtgaggatctagatagtgacatacctcgtccaacgtgtctccagcccagaattgaacgcggccgaacttagcctcctcccggaattagttattcaattcatatatcccaaacccagcattctgacagctattccaatctctatcactatcaaaaccaataccaacttcacatctccaaccacatacctataccacagcacactcatcctcacacaaacaaatctctccaaaatgggcttcaaatccaccctggcacgctgcatgcgaaaggaccgtctctccaaaagactctcggcaacaagcaccaaggtccacgacgaagactcaaacgatctaatcaaaacaacctccgaaacagtctcgacccgcgcaagcatggagtccaccttaaccatggtgcaccactcgttccacgaaccagtcctgccaggcgagtcgccggcgaaccgcatgcagatcaggacagatagtgggaatatgcggacgttatttgatgaagacactacttccaaccaaccgacagaccgcgctaccaaggcgctgtctagacccgcatatccgattttgaaattggattgtcggtcgcctgtcgatgcaccgaggagggtgttgcaggagccttgggagatgtcaacagatgggaataggagcaaaaccccggtgattgctggttatcccggaaagggtgcttcgggcttttcgtctaagacaacggcccaggagggtctttcgcccactgagaaagttgtggccgagaagaaggataagaggtctatggcggctttgctgaaaagacattgtggattgaacatcccgcgctcgtcgatttcaattaaggcttcgcgcgatcttcagtcgccgaagtggttggattctgctggggttacggaggaggaggctttggtggataagcaggatgggaagtgggtggaggtggatttgcatgatgagaggaggaggaatagtgtctggggtggtgttgcgcttgggagactttggtaaaaagtagtggatcggaatgagtgttagttcttttgtacatagttggcacggtatttaattgaagtcaaaattgaacggttgtctctctgaacgaatggacatgatgatttgtaattaatttccatgttgataaatggattgaagacgaggcaacatgaaaaggaggtcatgaacaggaagtgaaaaaggatctagctatgccccagctggtttcgtcgagggggccgatgtaatggagtgcgaaggagcttaggatactggacgccgaaagcagacgagggagtctagtgaattaggagagaattgaccgatctgagaaaatggatgatgatgcaacgagtctaatgaattaaagtaatatatatggaaaagccctaaccgagacagaaactgggccgttccaatgcgcagggaacaagtaataagcagaaatcaaaacaatcttctttctccgagggtgccacacgacacaagttaaatgatacacgagatggttcaaaaggaatctaactaatcaattgaaagccaaaagcctacttcccatgcccgaaatcgataacagtccaaaccggcagtggtaccatactctgcaccaaggtccaaagagctggcgagattgccaatgctttttgcgtgatgagagaaaacacggcgagacgcttagaggatggagccaagggcaacacaggggaggccgagaccgatgaggtcggagttctgtaagatatgtcagttgtagtcgaaatagcgtggatgttggagcactaacggcgctggaaggagagttctggcagcaggcaatgttctgcttgcacttctggttgatgagatcctggatggggacaccaatgaggacggggatctggagatccagcttggagcactggtcgaagagaccgaggccagaagcaccggatccggagccgatcaggttgctgagggtaccaccgaggattccggagttgatgtcggtggtgtcaccggcgtagacagccttgttgcagcaagagagctgggcctggtcaccacacttggcctgagcctgcttgacagtcatgttgtcggggacagcgaagcgaacgtcggtgttgcccttgttgccgacaccgttgccggagccagcaccaccagcggaggcgcctccagggggaagagcgtagacagtggcagcgaggccgaggacaatggcggagagagagaactgcattgtgacggtggatttggatttgaacgagagaagactcggagagtgtagaagattgaagaatagaaggaaagagtgaaagagagtgtttgatgtggatgaagaaaaaacaaaacgagggcgatgaatcacctcatctttatagatttgaccggcggtctgtgagtcgccctgactccatactctagggccaaattgttttgtttcctgccaagatgatatccagtatgtccccggaatgttactggttaggaaggggagagggagatcgctccactccgcagggcttgcaggccaacgagggagctcctgtggaggctcctggtatggatctactgccaggttctcacttcacgcgactagggacatacctggcattcccttgccctcgctcacctgcctggccgaggggagtgtccacaaattgcctgtaatgtttggatgaaaacaggtgtaatccagatacagctatgctgtaccttctctaactacaaacatccatagcccgtaaacctaatcaaagtaagcttaagctcttcaagtgggtctaagggcgtccctggagacttcgatttcccagtacaggggcttttctccctttcattggacttgcactttagaagctaaggcatgtaacgtatacactaattactcatcgaaggcacctgactctactgagaaggctgggattcttcctctaagtggtcgaatctccgtaggaggatcatctgcaagggtgactgcaccccgggcactaaacctacgtagggagagaaccaagacactcccttcattgtttaatttcctttaaactacgaggaattgagcactgtaatggtaatcacgagccattcccgtgaagtctccgattgggatctcgctttcccccgagaataatggtgccgattgcgaccaagcttccccctggcggcttctcacagacatgaatcggtcttgtttgcatggtttgacctcacacatcttgtacccttcactagattcttagtcaagtaatctcttcccttagtctatctgtagtctgcattgctagtgtaccttacttctcaatttagtcccctgtcgcattttctaatcaagtcttcgatgacctcgagaatggccgggatcttgctagattcattcaaaatgcgtatcgcaatcttattgagagtaagtccgtcgatgaattgtatagtcacacttgaatgaggacgatatggagaatgtagtggaaaatgatgcctggcgtcctttgcgctgcccacagtattagatagtacgtcattctagtagagtatctggtagtcaatggcctaatggtcgctacttggggtaattccccaactagtaaagtgcaacgctgattgatagtcaaccggctgttctagtagtcttcacgtaatgaatataccacaatctcataataggttagataattctctctatgtctctaataatagtttggttgtgatcttcttattatacttcctgctgaagtagttggggtaggaaatatttgtttgaatgtagaggttctaaatatatatttcgtcggaggacaacgattccaagatacagcacacaatatgtatattgtagacctaactacataacaataaaaatagtgttttcagatatgcaattgctcaatggatttaactatatcatttaccaaatttcctaatagtaccttcatggtcgttcatggtgccaaccaaatggtcgaaatgtctctctcctaacgcctgccgcacctcccacgcgtgttcaattaaatctgaaaaaatacagagatttgacgaccatctctagcaaaaattcaaggtcgcgatcgatccgattgagtattttttttcagcgttgaccaggcattttcaatggggtataccctactatggctattaggaccagttcccattctacatcaactgatcggccgtgaataagcgaattatcttgcataaatgttccttcaagatattagtaaacgcgaggaattgcagcctctaaatctccaaaacatcgcaatacacggcttcaaatgagggtgtgagatccgctatctagggatgtacggagtaccagggtgcccgccgcttgctatggtcttataaaacatctatctatctaacgaaattccgtatttatatcaattcaaaatggaaataaatcaagggaacagatctgaaggcgcatctcctgaaaagacctccaaccccgaaacaaaatcattccatagcatcttcgaagtcatgggcgcattactatatggctggacaccagaagccctcaagagatcattcatccgaggaagtaagacatcgactgcctgcgcttccatttcgcgttgaatttctctgctgagtccaccttgttcaacgtaccacgctgagtcttccttcaaaaccacgctctcgtaaaggttaagcaagctcgggtcaacatttgcatctatagcagcttcataggccatcctgtgaccaatcgcctcaactaatggaagagcgagcgggaggatatctcgattgaaccgctcgcttcggtgaatccccttggcaccttgttgaaggagatccctcgcttcggagaacagggaggcctcatgccgagcaatggggctggtggaatcgttcggtggcggcatttgatatcgaccgagcaatagttccgacgcgagtcctgtgtttcacggttagtcttcctcgagaaatttcaagttccagacacgtacggatagcaaggacgcggatatcaccctctgcagtcgatgcgccgcgcatctccagctaggaaggagaatcagtcagctgtcaaaggagtaagtaatactaagatcttacctccatctgaaggagttgattatgctcataatgcccgtgccacccacaccgttcattcatagcggtgatgcttttgctgaaatgacccagtgctatcgccttgaaagctgtggctataccatggcgcactcgggggtcaacgctctgttctcggaacgctatcgctgcagaaactaggaatgcttctagcacactatactgggcgatagcatggaggatgggcatatgttgagtccggaaatcaatcactgccatcggggttccatcctggccactaacaagcctgttctggctgaaacaggcagcattgtaggcagcgagcttgagtgacggtatgacacacccggagaggaagagagtccccactgcaacgcggtgaatcgaggataagaactcttcgcgcttgtcttctgttccttcaacactaccaagtaaggcggattttggtaggcgaacgtggtcaaagtatgtgagagcatgatcgactggatgcgcaccagttcgtggaggcaaggccctttttaaagattagctcttatagttgaggtattggaaggcgcttgcggctcacttcgacataatacccttgcacatctcttttccgtttccaagctggactaggaatggccggattccagagtctttatctccactcacaagacgagccatcacaattgcaaccactggaataccgccccttggggtggttggcggcatgaccctgagactatctgttagacaatttcagaactgaatgcttatattctgcagcttactttgcatcgtttggggaaggagtatgaaggtcgatgtcaccatcaggcagaattgttgcggttgtctgtatattccgtgcatctaatccatgattcacttcggtcaacataaattgtgccctggatttcagccccgttaggtataaatatttgaagatttgcttatggatagacccacgagatatcgaaatccaaagcggattggaggatccgctggagctctggacgtttcaatgcaaaaggagccagcgtgcccacaaatagattgcactggatactaaggagggtgaaagctccaccgtcgagtgttagtagaggctctcggtgtagcttccagaatttaggagtgatgtataaaacatccttaagcgtcaggcctattacagttagtggttgcatatagtggcggaagataaatagggaataccatatgcattagcaaaagccttcgccctctggtaactcagtctggtagattcctctagactgagagagcgtggggctggcttgaagagttccgaacgtgctagatcctccatggctggatctacctgctgtagctgcagcagaaactgctgtaatccgttctccatagtgggcagttattctgtatgaagggtttgaatatattcactatcgaaaagggaacacttaggggtatataaaccacccgagagaaactactttatgcatttcagcagggttagccagcaatatcccgctttttttcgatagacctgatcggtgctgaaatttagaacacaagacatacgtattggcatagtggatcgacaaaaaagataatgccagtttctggttatagggtttagcgactcatcattcgatgctgccttcggcttttccttcctgtttatggaagccggaacagatcggtgtattcggatcaatatcacgatattatactgaatattaggaacatgtggattctgtcaaattcatggctagctgggtctccattttttattgactagggtggatccaaggtatagtttgtctcgcgtgaggatcgaatataagtggatttgctgaccgctagaacaaaaataggggtctagcctgttgatcgattaagttggtgagatcgatctaaatatcttaaaagtttcggatcttgaagcttgcattgatctatgttcgatagaacctcgaatccggagaagatcgagtgaatactaggtccaaatgcgttatcggctactccggagatttgtatgcaattatttcttttccatcgcatgtgtattgaggagccttatcattgtggaagaccgtgttctcgtatagagtacttttactttgtatgcgggctatgcatgcaagatccccactgctggagggaatatactcctcactatcttcctacactgagtactccttacatagcgccacgagacgaatcttcactgtatcttcctgtatgatcaatgcaagtgtagttcagcacagccagagagtcgatacatccacgatgactatattcaagcttatgctgcatactaaacaactcaaaccaataaatcaacccaaggtgcattagccatatcagcaagagtttactagacaaaattattagataccgaaaagatacagtggcaacttatattctatatcacaatgaaagaggttgcataagctcttgattagcccagctcataatcgaaagtacctgagactcttgctcaagcgcgccatccccgaggagaccgaccttattggatattttggacagatactgtagacgacaatcagcatagtgatgatgtagacagatgacacaatgcagcacttcgatgccgggaatcttgccctggcttagtggaaagtttggccatctacatgatcttaccgatattttggcgtagaattacctcgacgagctcgtatggtactcctttgagttcggcctcgaacacattagttagtttcctaatatcgggctgtgatcagattgacggcaagatgtgctaagcatataggggtagttagttatacaaagatcaaggcgttgatattatatattagtgattgactttcaattacgtccaaatcatatttttcaagaataaacgagtcgtatatattattcccagaaaaaaacaagtttgatcagatcgagccctagtccgcattgctttgcattcaatacatgcaatggaacaaatgacgatcagacaaaatgaattaaaaatctgtttctcagaaattgaacaagaagattattagatgaaaagcgccaaaagggaaataccaaaagcccagagactacacaagggtagtttcgatccaacatttccgtaagcgacagtttcagttggctcggatcctgaaggcttggagacagtgatcccaggggcagttggcggaagagaagaggtgggcttgcagctagttgtcatcttcgaagaggacgcgtgcgcatagtgatgggtcttggaaggagtactggtcgtagtaacaaccaccagattcacagatgttgttgaggaacaagtgaccgtgctgaactcaacgagcggcacagttgctgtgtgcgaggcccagctgatggtggtacagggagcctgagggacagtcgtggctacagtctcaacaaaggtacgtgtgttgccagtgatgtgagggccagcagtggtcttgggaacgaggggagaagtgcaggttgtagcaatgtctacaatagcagggttctccgggacgaagggggcgcaaataccagcgaagtaagcaagggcggaatcttcctccgtctgggaggtgctccaggcccgaatgcacccgctaactttgtccgtaaactcggtggatgggcagaagcatcccacatcgctgttggagtcacacttaggaatagagagccatgtgttgagacacttggggaccacgttggggcaaggggcagtaacagcgggcgggctgggcgcgattggggttggggtactaatgggagtagtgtgcgaatggacgaaatgagatgttgtgcagcttgtgctaggggtttgcacgggcgtagacgaggtgcaacttgtgctagtggacgtttgcacgggcgtagatgaggcgcaacttgtgctagaaaacgtttgcacgggcgtagacgagcagggcgtgcttgacagtggatgtgtagaggtagtaagaacgcttgaactagggcattcagttgcagttgatgcccatttagtgacgatgatctcctcagtagtccagactgtggaagtcgtcatatggtgccaagaatgactagtcgtaggaacatccggcacagacgaggtccaatggaaaggaggcaaggaagtagtcgacttcggggggtccgaaggaaccgtctgcacgggcgtagatgggcagactgtggttgacagtggatatgtagatgtaatcaaaacagttgaatgagcaggacagttagtcacggttggtggacattgggtgatggtgatctcctcggtagtccagaccgtggaagtcgtccaatgctggaaagagctgctagtcgtaggaacctgcggcacggatgaggtccaatggaaaggaggcaaagaaacagtcgagctcggactaggctcagagtgatagtgagagtgagagtgagggggttcaatgacaggaactggtggcttggacccagtagagcagtcaaagtcgattgaatggatctcgagatcacaatcaccaaacttgctctcttcaggaagcgtgaactcgactgaaacagcaccgccacactggtcattgccaacatcggttcccttgtacgagctcgaagtgacatggtgacaggaagaaccatcgggcatctcatagatgatgaagatatcagtgttccgggaagttgaaagatggaagtttcggattgagaatggagcgtcggcggcggaaatcttgattgtccagtcatcatcacgagaaagctttcccccaaggcaagtacccttaaagtagttagaatcaatagcattttacatatccaagagcgacctaccccgtaactagatccatgacagccattcttgggctcgaggccaacgaagtggaagccttcaaagctccaattgtcaccgtttgccaactcagacaagtcgaagcctttctgctgaacatcggagcactgattgtcggtgttctctggactggtgtagcagacatcggtaccccaccactaagatatccaaagtcagatttgtattcggagttgtagaatggaaatactcacaaggccagccggatgagctagtgcagcgctaaaaagcgaaagaagagcaattcccttcataatgggcaaagctatattagttcaagctagtaattaaaataatataataaaatgagtgaatgacgcgagttgggcgtgggtgtaaaaagaacgtggcgaggtttgtcgactggatgttggatggagagcttccaagagtgccaggacatggtcctttttaacctcaaataagatattcggacgaactactcctactcgggctctactgtcaacaaaatcagaaagtagaaaggaatgtcagccacaacagcataggaattccccatcgatccaatggtgagaactcatactcgtgaagcagctggattcactgaaatcagggatctcacatcgctgtagttcagggaatcaatgcagggggaacattccagtgctagaagccccgaaagccaatcagagcagtcggtaactattcccgagctatagggctcgctcaaaatctcccgcaagcccaaagggttgggaattatgcaaggagctacacctctcgatttatttagcagtttggaaagacatgttcaggttataccaatttgtatcctacagtctctaaacactttcctagttatgaatgactctattagtaccgttgtaggtttgtgacgtgtattcggtttcaactgaaaatgttcaattttccttcatactccctagatatatcaaagcctgtatctatagttcgattgtggtatctgcaatccacgaggcgttgaaatacgtggaagagatctaaaacagggcaaactaaatatacattcctgctcgcgcattccaccagaaagttgcctagcaagtaatcgtttcattttctcttgataattgtgttatatcaaataaagcttgggcaaagcccacacataaatctgttgttgactattcgtatgtccgcgggaagctccaaagggaacttatatcgagtggagaagatagcgcaccacgggtagcaggatatttccatgttcgaagagcatgctcctgagatcgtgctgctgagatgattgtctgagtgccagtcctgcagtccgcattgtatctcgaagccaatcagtagcaaatccgaaatctagaaatcagtccgttgaagaacacggaaagctgaactgcgaagtatttcagcattgtaatgatctaagcttcatctgaaagaaaagcgatccattcaatcaagttaaatacagcgccgtcgtggaggatgtaggtgcagtcctcgactcgacttagacgctaatccaattcgggattagcgtataaatcgaatcatttaggcaggcggtgactcttaaatgaacgcacggaccctctatttcgactgggtagatcgcatccaccgatctctttctcttttgtcaattgtttatctgactgcaagtatcgttccttttattgctcagcatgtctgactcgccagaagtttccaaacctgttccacaggagcgcgccagtagctcgcccatccctgcttcgtcgggccttgagacggaagccaagcatgacatcgacagccagaaagaccaggcggaaaagaatgacccccaacccaccgaagaactggagatccccgcatccaagtcgcaacccgatgaaccagagcaagatgaagtgacatctgcaccaccactccccgacgaagtcccacctccacttcccgccgaggctccgcctgcgaaggccgaggacgatggatgggaacctgcatgggacgccactgcaggggcatattacttttacaaccgcttcactagagtctcccagtgggaaaaccctcgcgtgccacaggtcccaggagtcccggaaatttcagcagcacccggcacagaagacgcagcccccaaaaaagagccaatacttggtggctacaatcccgccatccacggcaattacgaccccaccgcatcgtacgcgcagtaccacgaagagccagcacagcccacgaacgcagccggattcgaaccctccgcagcatatgcagctaccggcacatttaaccgcttcactggacgatggcaagctgcaacaatcaatccggagaatcataatgatgagaacaagtctcgcagacagatgaacgctttcttcgacgttgatgccgcggcaaatagccatgacggccggagtttgcgcgccgagcgcagtgcaaggaagctaacaaagcaagagttgaagcagttcaaggagaagcgtcgtgaaaagaaggaggagaagaggcgggcttggctcagggattaatggtgtgtagctatgtttaagttctgggaggaagggagggttattcgatgtattctctcgttgccaccggtcgcattgcaatttcggagctttttgataccatctcaccggatgtgagagccggcgtttgagcttgtttgattctttttttctcggcgttttgcatgtggatagaggcagacagacttcctgtcgtctatccacgattgagcaaagttatttgtacagcgtaccatgtatcaacacaaacaatgtctcataatgaggctctcctagtaatttagattcgtattatacgacacgttgcgactagcgtccacgttaattcaacgacttctattgtaccgttcactgatagcccactatcagtcacatgacccgcgatatcaaattattttttgcggcgatcgcttcatttgttgccggatactctacgctagaaagcaaagaactgaaagcaaaggtaagattgaatgtattccctgttgattgactggaaaaataccctcaacaccgactttcattttgtggctggaacttagccttcacattgaaacgcttatcaacgacctgattgcatggatatatcgcgggggaggatgcgtactatgcaaaatccccaattccaagagtcctttatgattctagatatcctaccctcgctttccttgctcattgtcctgtcatcttccgtgaatatcgacttattactgacgccttactccagctatatcaaataaagtgggatatcaagaacaaccccaccaaaaagaaagagaaaaaaaaaaacataataccaaaatcctggttcatcacacatcatgtccgcctccacgacatcacaggcaaagccttcagtgccaatcgcactctctgccgaggcagtcgacgacctgatctatgacgcccgagccggcgacctcgaggccctaaatgaggacatcgccaatctagccagccaacacagctgcaacgagtcacagatcgtggcatccgccatagacatggcagatgagagtgagggcggctctggatcctgcattctgcacttccccgctgcgaatggaaactccggtatgtcatttcaacgacttgacctgacttgcttgtttactaacaccgctcagaaatcctcaaaactctgctccaaaagctgtcatctgcagacgcagcgcagcgtgtcgcgttcgttaaccaccgcaacaactctggcaacacgcctcttcactgggctgcgctcaacgcgcacctggaatgtgtcaaggcacttgtagaagccggcgccgaccttgaggtcaagaacgatgctggtcacgatgctgtgttcctcgctgagcggacggcgtgggctactgttgaaggtgatgaggaagccgagggtgctgagggcgatgatgctcaggttcaggagattgagatgactattggtgagaatgaggatgaggagaagcctgctgagggcgctggtgaggtatctgccggcagacaggttgttgagtggctcctggcttcggatggtggcgctaatttggagaagggggctactcagggtgaggctagtggatctgcttgatttatgttcgaggaggtcggaatgacattggttctttttgggcgggattggaaatgattgaagaaaagtttaagatttcacgcatgcaatcggtgatatgggtactttctattcttgcatatgttgtttgttcgtgtctatattaatgcattttgattatttctatcataatagtacaccgaaagatgctgcagggcttttagaatgctgccctagtatacagaatgttcatatcctctcatttacatatcagttcaatcactgcgaacttttcccgtcaccgagccggtgcaagacgagacccccataggtagcggagtagcgggatcgatctcccgaacttttgcatcgaagccgaccttgaagcgccggtctcgccagacgactgtcacaccgccatacaccgccatgatccagataggcagggccagcaattcgcggccgagccaggcggcgagccattgcatgaacggacgacgagtaatatgggatgatcgggagcgttgaggccgagcgaaatctggggtatcctcatccaactcgatgcattttgcggaatgcagcatgatatatagtgtccaatcgaccaggatccagaagactatgccaagtgcgaacaaaacaaaaaacgcacgccacgtcccgagacgggcagcaaattgcacgccattccgctcgagatacggcgccaaggcagtggtgatgccccaggcaccatagagtgtgcataggaatgactcagtgcctggttcgacaagcgtagcgagaagaacggtaaatttacggactcgcagccaccggacacgccgggcgatgtatgccggcacgctcatgttggcaacaggctgaatagccatgtcaccaaagaccatggcatgcttgccccaacgctcgcggagctctttctcttcccgcacctgcttcttccacagtagatcaccaatcagatggtcctcacagatattgtcggagaagaaatcgatgccaggatggcgagcttgggaacccgacaccgaatgactggtgagatagtcaaggtgggagcggcggaacatgttagatttccccacgatgcacggcgcaacaagtaccgtattgatcgcggtgtacattttggcgtgcgcggaggacaggaacagctcttctaaacgaccgcctccagtcgcgatcatggctgaaggcccatcctctggacggacggacggcatcgctgcggccgctgtatcagcatccgtggcttctgggttggcatctaggagcgcctgccgctcctcacgcaggttgctatctcctgtaacatccactgccacaggtagatggtgcacaaacttgtatttcttgctcgatgagggtccagtcccgcacagcctgtctaccatccgggcacagactcccttcccgacccagacattgcagtcaattatccagacgatatctcctttcgcttctctgtatgcgcggctcatatttcggatcttgggattcggtccgagcgtgtacgtattgatgccatcctgctgcaagaggggatcctcgtcttcgacgaaaatttgcgcgtccacatgcgggaagtcgttaattagtttgcggagggtaggataggctgggtctgcacgcgtcgccacgcagagacgaatgctgagcttgtcgcgcgggtaggactgtcggaaggtggcagcaaggcagtcatagaggtgcggctcaaggcctttgacgggccggatggcggtgacgtgcggtacatcggaggcggaggcgtttgttagccgtgaccgataaggctggctgaggaaatatttccatctgagcagaaagggattgcgttaggacatggtagctcaaaaatagcaggccaaatcgtacatctgaaaatatcctaggctgcacaccgccagtatgaatgcataccaaatcagggcaatccagccgattgcgacggacgcgtacagcgcgccatcgtcagacctgcgagcgaggaacgaaaagataggctttagcatgggacacgaagggaaagcgacatggaagcagacgaaaaggacattttggaggagaaaagaagcaattggatcgggtggattctcatttcggcagttagctgtctccgccctcacagtcaggtacacggccaaccagaggacatctcgttccactagtatacggagtcaatatcaaaatagcttgtctgttcggaacccccggatgtaagaaaacgtacttctacagttgaattggggcaattcggcaattggttgctattagattattttcgaatgtcattatgaagacaaaaagatccatttccccccaaactccaaggcctattccatgataccagacgcaatgcaaattcccctttaatcaagtttttttcttcttccggaccaagctcgcattcagcacgttgacactagtcggctctgatggagtaggttgcgtgtctcccgatccactcggtgtttgggcattcacagcgggcatgttgtcctcgcccaatgacttctttcgcttgcggatcaatccgagatcaaggacattgttggcggtggtattggcaggctgagtagtgctgctcgtggtgttggtgccgacaaccttcttgccccacgtaagctcatccgcgagagaggaaacttggtcgacgtagagtttggtactggcgatgacttctttctcatcatagaaatggtcgagaaccgaatccatcatcgttttgtagtccggttcgctgagaacgacttgtccgcgtccggcctccggccagtcgaaagggttgacagtgttagatccatcatcccggggaagttttggggaggtatctgtggtcgtcaacgtggcaatttcttcggactggctcgagccattctccactttcagctcgcccgaaatggtggagttgtcagaggaaccgcgtgtctgactttccattgacgtcgagttcatcagaccaggaggattgatcactagccacaggaagccaactaaccgaccagcagaacattcctggcggaaggacatcatctcccagaattggtccaaggaccgtacactgcgccagcgtccagcattgggggcgacaggctcaccttccttcgattcaggaagttcactgtccaggtcgacgaggaaacgagtcttgggatcgtcggggaaacgaggcactaagcagcggggaggagccgaagggtcgtggtacaattgcttcagtgggtagctgttgagccaccgtgggcgatcctgtgcatcggtcttggccgtaggcggaaagaaattgcgcgtttcaaagcggtcgcagcttggaacgatcaagtatgcggtggcagaggccttggcagcttcgactgtttgatccagcgctttcgtctcttgaagagcagactctggctcgtgctcgcgtaaaatcggatcgagaacacaacaccaccacttgattaagcctcgatcgtccagaacatgcttttcggcgttctcaatactgcccgggaataggtactgattctgggcgcgggcgaacagcgacacgaccaggcgtacaccgggccgctggcgggttcgcgccagaaatgagagaaatgtatttgagaccaatctcagaacagagaccttgcgcggtaattttaggagatgcaggagaccagtcgagtcggctttggagatgaagatggtggtcaagtgggccgtgttgtagaccatcacctccattccgaagataattgtttcaccgtcatcattggcgtcaattgacacggagaggaaatgattttcgcagaatgtcggctcggagacctggcccggcgcagctgcaaagagagcctcgcagggagtaggagttgaggagacatggcgaacggtgatctcaacccccgtggggagtgccttggccaagagatctgccagatctaccgccattattgttcgtccaattagagtcgtggaaaaggtgaagagaggagctgaagacggagctcgatttcacacccttgaagatcacgtgccaggaacatatttgtaccgccagtccaagggggtcgatatacagacatttggacatctttgatgcggtagtccaattgcgtaggtggtgatgaggcagtgaagactttagcaatgggattgaggctaggtagatgaccttaatgaaagaatgtggcgaaaggcttattgcatagactataacgcttggtgccgagcatgctatactacgatgaatgaatatgcgatatttgacgcgttaacgcttgtgctctcaccagctcttgcacattcactcgctcttgccctttcaccaaccttttccacgcttattctctcaaccacaactcaaatctcactcaatccaaactctgctactcgtggacacaagcagaatcaaacataccattgaaggtaagcaagactaatcagattaatctttcattgagcggaccaattgtactaatatgtcatcgaacatgagaagcccggcttcaagtgtaacagagccgcaacccggtcacaccgagagtacttatcaagatgtcttacaacccccccggggacttcataggtaagtctatacttgtgtcacctcactataatcagaatagccactaatcatgcatcctagtgcccgacatcaacacacaggaagtctgcactcagttgcagatccgttacgcctgcggtcactcgacaggcggcgagttcgttaaatgcccacggcacgtcaaaaaagaggacgaacgctgcaccagccgtcaaatcaaccatgtagatgtcaagaattcgtcgcacaagtgtcgcctatgcctgcgaagtgaatgagatatggtatggtatccaatcggcgggagttgatggtgagctttatcttgagatcgtcggaagggcgaagacgagggttatggcatatgaatatcacattgacaaaggagccgatactgtctatcttttaatcaaggagaatccggaaagaatccgactagggttattaacataaatccctgtaaaaagccacacacggggcattgatgtaatggtacataagtgatagtaggaccttggtaccatagttgggccggatgccacttaaaagtaagaagccacagcatctagatcatcggcattgagtagaatgactccttctctcaaaagagtcctccagacaaggtttcgtgcacgaatcgggaagtgtggcgtgttccaatatctagccccaataccgcgctcatttgcggtggaaatttggtcccggagagctttgagttggtcgtctgagagaattggatctgtatcgacagttatcttgccgacggcttcccggaaattcgtcgaagcaacaggcgagataacgccagttatatcggcatatttgggatcattgagatctgccagcggcgcatcgaagaagtagtctcggtctttgatgggcgctaccatatcgaacggtgtctctccggtgccaatgatggtgacgggtccattggtaacggttttgccatccttgacggtagttaagtagcccttctctcttagaggctctaaagcggcaattaccgcctggaacgtctcggggccggatgttttcacatcaatgaagaagtaaagcgtttggtcgggaacggtatcccacacaccgctgtttcaagaaagcattagcagtgagaccatatcgggtcctggccagatactcactttttagttggcgatgatataaatggactctcggggttctggcgctctagcacgtctaaaattgggttgatatacaaggattcaagagttcgagactccgtcagggcggattcatcgtggccaaccttgtctaattagcatgctacccagaagagcgcgcaaggcatcatcggttaattaagctcacatagagggtgccattgtataaccagacatcggcttcggtagatgtgcagccatgtgagagacctgggcatggtaatgttagggataatcagttagatagtagagctctgcataccggtatagaaaggctcgtctcgccaatagtcactttgggataatcagcggatgaacaagtttggagtgaccatgagaagtgtccttacttatgagaatgaacaggaatctagagattcgttgcatccagggttaacaatattccagatggcggaaaccccacagagtttatcgatacatggtgccacagatagactcacgggtaatagatctcttgttagatcagtgggatacctatagtctgggctgccatgggtgttttttaagatgctctgtaggctagaggtgatcgccccgagagctggatccggacccgcgaggagagccacagcaacgctagagaggaataacatgaaggcagagggcatttaatgacaagatcacccgaataattgacccgcctttatatatcgagctggagttgaaagaaggtggaattcaattgactgaattggagaggcaaattgcgatgacgatcggaacccggactcacgtgtttccacaaggggtatccataacatcgaggtcgaacattttccaagttagtatagaatgaatcgagttgatcatttgaaactgattatatctatcatgtggtcgctctctcgactcttagaaaaagaacagccaaagggcaatcaaagtgcgacaccaattaagagctgatcgcactggtcatttacttgagagactacaagaaaccgagaatagtaatgtatggtatttggcatgaatggcagacatggatttaagaaggtgctaaaaacatgaaaatcgcaagaccagcaccgtcgtcatggaacttgaaggcggaagacagcgagattgtagaagaaaaggtctgattatgaaagagacccatacgtcacggaaatattgccttaaacctcccgcacacttggcgaagaggcagctccagagtcttgtgagttccgaccccgaaggctgaggtttccgatacgttggaccaggttgctgcccacagcatcaactgcacccttgggcgcaagcaaagtcgggccttgagcggcagcttcttggactctgaagagtttaatggctgtgccgttccaaacaccaactgttcctggagttgcaccagaagcggaacccactaccatctcgctggagaagatgaagccccacagcaacgattcgtaccagcccatggaaagtgcggaccactcgaatgattgcacgcgaaccggcgttggttcggagattatacttgtaaccccaggctcttcagcaaatgatggaagattgtggattagtgtacgggcctccggactagcagcgctggcaagcgctgcatcgggtatatgaggtgcaatggctgagattatggtaaggattgtatgcaatggaagctctggcaaccaagactcgagctggcaaatattgttagtagcgaaacatttattggaaaaacggttcggtctgcatagacttacccatgggacggttggtgtgaagccactaggagagggtgtgaataaagcagacatgcttgtttgactggtcatgctgttctgccgggagaatggaggatgtccagctggtttctttcctcgtgccttttcggacattcctcgcacctgctgcactccgttctcatcaatggtggatgccatggagggtctccgtgaggtatgagttgagaatgatgattgagacggagtctgtgccccatcttcacgttcatcatcggagtcatcatcgccaattgcaaatgggctgttttcttcggggatcctagtcaacggcgacctggcacccgaaggagtatgtagatcatcctctgactgcgaaaatgtagggctaatagcgacatctgaagaactgctagctttcttcttctcattctgccgctcgatctcttgttggccactctcgagagtgaaagcccgcacggcctcaaagcgttgcttgtacttcagtatcgagtagacaaggtatgagttgtctagataaagtcagaagctatgaccgaaagagaagatctgggtagggtaattaccgatgaacttgtgctcgaggatgatgttaatgaagtcaagcaacgatgcaagaagagtatgattggattcgttcgccaacaagaagctgggcgcggacatagaagagaaaagctgaatgacctttgagcaggcgctgggagaaatatgttcgatatagggagcgatgttgttgaggatgatcagaagtggaggatacacagtgtctaggttccccttgctggttgtcatcaacgtgtgaattgactgtgctggttagtatggtattatttagatggaacaaaagacaaaccataatcagatagtcggcataagatccccggaacttgagcagtcggatcgattgtggtaaggtctcttgagcttcgaaactgttgttcaggctcttcgcaaatgtcgactccgcactcattgtctgaaggatgaaaacgcacatccggaccactccttgtttggaaggatccattctatattccatcgcatagaagatacatagaacaaggaagtcatgggagcgattagagtcgatgataaatgaccggaaccttttgttgcattgcaaggtctcccagaaaaggaccaacatctcaggggcccattttaccgatttttgactcccaggaagatacgaagcggtagcttgcatctagttcgatcagttagcataacttcttaatacacgagtaagcagagaataaataccggctggttcagaattctcgtcatgccatccaccaggaactggaagtcttgaggtctatgtagcctgccgaagtaatggcgataataattcttcggtggtgttccacggccatcttctggaataggatacatcaaaaggacaagaagaagttgcacgcaataaatcaccaaaatctgcctgggatctttccaaacaacgtggtcatatgggactctccacgacgcggggttatacttcatggcctgttttggattagcatagctccaccgccgattgagcaaaacataacatactgtgttgagaagagagcaaaggagggtcaagacagcctgcttatcttggcatgttgtgatataagtgattgccttgacaccctgaacgggcaatgtatctataccagtcagtaaaagttagagtaccttggttgtatcagactatgaactcactagacggcaaatacatggcctttccagtcagagtaagcataagccgcagaatctcgcatcggttgctctccaatgttttgttagaccccatagccgtgttacagccgacaccactctgccaaattgaaaaagagaccttgctctttgcagttggaagtcgtgggattgtgaagtcagcaaagaagagcaagtccatcaatgtgtctatcaactcctcagcaagaggcttcaaatcttcgtaatcctccgcacgcggtgatgtcgcctcttggttaccctccgattgtgcttcgtcgaagagtacctccccagcaatctgtgattgtcttgtccttctccttctccgtgtccagaatacattatcatcccattcctccagatgctccgcctcgtaaacataggggaggagacgagtgaggatccgaatgcagttgaggacctcacgctcgggggcaagatcggggtcggggaatgagggatggtttctcaatacagtcagtcgtgatgcgactgctagtatgagtgttttgaagttgggcaaggcatgatcgcgtgtgcgtcgtatgtcagccggtgtgaaaaggctaaagacatcttcggttgattcaggaagttcccagaactgccaccgtggttagcctccaagtctccaggacatacagtcaatatgtatcagaacgtactcgggtccagtaggggtcgtctgcggggatctcctgttcctcggagaggcggaagataccctgtttgaagacaagcttggactccgaagctcccatagcaaaaggaaagagctagtagtcacgccgttctcggtttcatgcggattttcacagcaaatttcgaagtgtaagtgatgcgagggcgctttctgcctgtttatttgccgagtgctagaagtggttggcggtcctaatcgtccgggcgcgggatcttggcttgaacacggggtatggcagatagaccgaatgccaacagtacggtttacagtagacggtactccgtacatatgatgagacatcacagcagaatgatacctcatcttatatacatctccttatcctattctgacctatttgttgccatgtatcaaaaggcacttttagcatccatagggaggacggaaaaaatatccaacagccaccggtttcggtttctatgaacaacacgaatgtacgtcaaatgaaacgagcctgtaataataagcgcgaattggtatccttgaaatacattacgaatgaagcaaccgctatgacattgaacacgttaaacaccaaaaccatgaatgacccaagtgcccgttcgcaagtttgtccagaaagctggaaagaatcagggggctcccccgctagccgaaagccggcggctcctctcatatagccacttgttcttgacccccagacttcctcgttttcccataagcggggaaggtgtgcctgggcccatgctcatggtcgactctccaaaggagttacttcgagtcagaggggacgaggatccaaagctctggcgttgaatagattctctgcctccattcgacatcgctttgtaaagcagggggctggatacaggcgagaagggtgtgctgatggaagagcgacgctcagaaaagcttgcattcgcggaaattggggagggctgtctgctagcaggactggccttgcgtgaagaaagccggtatctgggtggggtaacaaatactgttccaggcgttgctggtggtgtggcagcaggatccaaaccaagaagtgagcgctgggtgggggtaaggggaatgtcggagaggtcgtccgttggccggaagaggggagagagggccactataacattgaaaacgaagaagagttggagaatgaataacgggatttcttgatagatatggttggtatcgagtatttggcgtaagcttaaataagaccgttagcacgcgacgcgacggatcagagttcttatcgcactcactagcttttgaaggtagatccaaatgtccagctcagtatcaaagctgcgccgttccaaacgagcttcttcacatttttctgatcaaatgtagctgcattttgccgccgaacgatctcttccagttgagggtgtcgccattttccaggggtcagggtaccctctggagtgggaggaggcagcggaggtgtcgctttcggggtggaaggaagaaattgagtggccattgctaccgtggtgaagatgatgtcgagagtgcagagtgaggtgaacttgactggagactaggatcgtgaaatcagctactgatccgtagatgcgtagactgtttttttgcgaggtctttttgacaagagggattggactcactgatattatgaactagtttagtacttacctagaagggagcaaacacaagcagctgtcagttagtagtgcacgtagcaatgaacaattcttctttcaaaaagtcattattgttgttgtttggctataaattgacgatcccaaagtggctgcgctcggcgctcaaggaaggggttgcacgggcataagttgacccggccaagctgacacaccttatcgccgtgcccctcaacgtcataactaactagttgctgactgttgacacttcttcatcttctgctccccatattgaccaactaaaatggctgatacttcacttgtggagaagctggataccttggtggccgatgttctcgccgactggaatatctacactaccattgtcgccgggattgtcctcgcttttgcggtttactctgtcgtctcgtctcgggatccagatgtgcatccgttcttacttgctcgccaatcgacagcagccccaatccgcaagcagggtgaatctgctacttataggtgcctagaaaccccatatggcttacctcttcgcttcggactaaacgtcaaggacccgggcgccccgaaatggaccggcggtcgaagaggagacctacgtgatatttggaagactgctgtgcgtggagctatgaatgaggacggtactctttcgggaaatcaaggcaagatttacacggtcttgggtcgaaaggccgtcgagcactctttggacgaggtgacgcaagaaatcaatgtcatcggtcatcatctccaaacttccggcgcgaaaacggtggctgtttgccttacagactctatcgagcttttagctacaatctttggtgcgtgccttatcatcctaggtgtgagtctcgatgtctaaccttgcgcaatataggtggtgcattctatggatacgagacggtcattgtgccgcacaaccttccagccgagacattatcagcacatcttcaacaggtaaaagcggatgtccttattgctgaagccggatctctggacctttctctcgtcgccaagggtaacaatcaattgacgctcgtcctttgggttgccaagtatggcaatcaacacatggactggaacgcactccccgagaacgtcgaagatactctgaaggttgcagtttggcatgaactggtcgaggagttcaaagaaatcgctagctatgatgtgcctcagtacgacccaaagacagcaacccctgccgtccacactgtttggccgtcttcctcacaatccggccaatttatcgatttccagccagaggtaagaccagctcaacttgtcaacttgtctgatatcactttcactgacattcaactagaacttggtgtctgccatcggagcattaacctccgccctccctcgtactcagcgtttcaacccaaccgacattgttcttcctatcgactctctttctcgcacctaccctctctgcatgactatggctgcactgtttgccaactcatccatcgccctgaactctgttgctggagaggatgtcgatttcgctttggctacagctggggtgtctcccacagtcattattgcctcatctcaaaccatggctgagtaccacgacaatatcatgcgcccgcacactggtatcatttcctctcttggacgctggcttcaggcacggactttagatgcaggaaacatgccgacgcgcaacgttttcagccaattggctcgtgtcagtccgacatctgagctttcgctagatgaattgcgcttgctttgcatctcccaccgtatcgatggcgaccctgccgtccatcttacctctgaacaattgaccgaccttagaatcttcaccggggctcggcttgtgtatgccttgaccggccccggtgttgctggtgcgattgcgcaaacaaacgcctttgattatagatgcctccccggtcctagccactttggcgccccgctgagtagcactgagattactctgaccaatatccctgaagactccccttacggcacagaagagggacaggtacgtcgagtccaattccgccactttcatatagaactaacattcacgtctagatcaccgtctctggccctgctgttgtcggtggcaccgtcactcttcctgaacgaggccatatcagcaaggacaataccttggaattgtcttcctgagcgtatcaatcccaaaatagcattctttatagcgtacttgaaacttgaactgccgggacatttggtaatgagtttgtgtatatttcatcaataaatttccaactatatgtataaatgtttggctgctagttgagcctttagtagtctatttagatgtcttctcggatgacacggctgtcctacgcattgcttttatcagattgctggtgacatgataaagattacttggaagagtatgttctgatgacaacccttaaagactctcaccgtccaatatgagctctccatgcatcagaacgcatttcttgtatgggattcatatctaactcggacagcgaatgtcattccttgttcagggcagaaatcgaagtcagtatccaacaagtggttgagaacagaaagaagctgtcggttgtcggattaagcgttgaagagtcgggcagcggcgagtgttttgaggcataggcgctagaatagaaaagctcaaagttgtttgatatcgcaatttataaacacagatgaagtacaaaggtagtaatacagccacatgtatgcaaatgagggtcacgccggacgccctctaactcaatcactgccggcgattgccgccacccaagaaagccttcttctggcgaacatagttggccacaacattctccacgctgcgacggtcgtgcttgcggtctctcaagaagtacaatctcgcccttctgcgcttcttctccgatcgctggacaatctccacgctgttcacgttgggactgaagaccttgatggacatctcaacagcgacacgagtaagctcgtttcgcagaaggaatgacgtttcaattccgcgcaacttgatgctcagaacaattccgttgaatgggtcgccgttcttgaatgtcactcgtacgatatcgcccgtcttgacactgcgcgggtttcgtcggtagtcgaacatggccttgcgctcaccggtaggatcgaggactgccaattgcgattcggtaactgctgcaatggggtctttgcatgctttgcgagcagatggcggagcagggtagatcttgaggggctcacgctctacatgagatagcgaccattagtacagctcgcgtcgttgcactcgattggaaaggacctaccaggatccggacgaaagcgaagaggtatttgggataggaattgctcaggcatgtttgggggaagaggtacccgttcgggcctcttcgaataggccgttgaaatgaatcgacggttgatgaagggttggataggctctgaggcccgtagcaaggaccttaagcagcccagcgggcgcattgctggtagagccgccatggttgtgatgaggatgtcaagtcaagaaagtcggagtcgagttttggccggatcggcagaatttccgccaagccttcgattgcccgttcgggttgcagataacagcgattcttttttctcctccgattctacgataccgatccacctcgttttcttgttcttactttgagggaaatttatcattctatcagctactactctcataccctgcatagcttcatatatagcctctgatcacacatgatggcgcaaatcgccatgagcaggctcttccgccaaagcaccaccggctcggtgcgccagtctattctgagaccgatgcaggcccgcagctatggttcgaactcaggtatgtattaataaccgatctatcgtgttgtcaaattctcatcggaggcgttcggaacagtaatcccaaccttcacctcaacatcctcccccgagttagacgaagccctggagcggttccgcaatgaactcttcatacccctcgctcttcccaagcgacagagaaagagcgtgttcagagagaaatacgccaaacaattggaaaacgagccgatcaccgtgaagattggcgagaccgaagagttcaccctaacgcccaagaagcaccacgatctgccatcgaagaaagacgctctcgaggttctcaagttgatggttgcgaccaagaactacagcaaccttttcccgtacctcagtggactccggatgtcaaactatgccatcaacagcgaccggtgggagttcatcattcgcaaaaccagcgcggctagcaagctttcaaccattatcgagtgtgccaagcagtcccatcgcaccggcttgactctcagcaacaggaacattgctcgccgtctgttctttgagcttcacaagacagcggcgaaagcgaatttcgagggagccccaaccgtcaaggctctgaaattggcgagggaggcagctagcctgatggatgctgatgaacactccgttcggaaccttgaggatgaccccaaacaccagcctttcgtcatcggcacgcttttggagctcagtgccgcctgtgcgaaaatcgatgagacccagataggcttagtccgtagctactctcagaagcttgatgcggcctggtcccgaggaaatttccaggacgacgcgtccactggctttgagaacatcgaaagagtcgaggagaaccttgccgtttacaacggcatgcgtttggccctcgagttgcccagggcatcacatgacactgggaatttccaggctcgctgtgataagcttaagcctatcctgatttcgcagttggagaaagtcaagaacgccgatgtgcttgcagacaatgtggttaaacaattgcttgcggacaagcccaaacaaaagatcgagacgaacgcttgagctatgttgtgattccttttggtgttgattgagccacatcggcgtgtataatactgtacttcccagatatttttgagctggctgtgtatttcacaaaaagatatcttatttctgccacatctgatcctgcaaggtgctatttcctgtcagtctcttccaatgaccgtgaacgaaacattttggtcgtagtgtgcagacataataaactagatgatcctcacaaatgcataccagatcggtcatatcagatttatcttacggtttcttccgagtgggaagtgcgagtaaagcgtcggttagggccacaaggtcacatgcatggtgctatatactactatatactacgcctccctcagctttcgataattcaacccacgtaaggtaggtctgcaggcagagatcgctaagtacggctttagcactaagcgaaccaatttcgtcagtttcatcatcagcaccgaaggaattgaggtgaatctagccgatagacgttgtcaccaactgggacttggaggagcccttaatcaccactctattttcgtttgaaaaaataaaatttgcatattcatcagcggtcgcatcatcatgagttcaattcgtgcgtattcatccatttctttacagcatcatactaactaaccgtaggactgtcatcccgatccgaccgtagaatcaaggacggtataggtcgcgtaagcgctacagctaccatacgctattacatagtattacctatagcaaggttatcgctgccccccgtcgccgttcctactggactccgcattgtcgcgcctaccgagagggagagcctcgggatcgtccgaaaacacagcactttatttctttgcggcatcatgctaaccgaatttgataggccacagaagtactgtgttctcggacgatcccgaggctctccctctcggttggcgcgacgatacggagtccagtgggagcggcgacagggacgatgatgcgaccgctgatgaagatacaaagaaaagatttcgagcgaaaacagagtggtgattgagaattggattgaatgtttactgcaatgaacctggggggatttataggagattctaatctctcccgtcgtcttacctagaagagcgtttctttgtttgcattcccttacgacccacctctggtctttgaagccggcatactgacgtgttcgctaacacagccccgttcgagcctttgagaacacgaagcgaggcttcatatctgagaaccgtttgtcgggctccttttgcctttctttttgttgattgaatacagcagtttgaatttttcttccctttttgttgttgtcgaacagagcatttactttcgccaagccggaaatacgacccgaaacaaactatataacaacaacacatgtgtttatcttgcactagaattggttatcaacacgaaaaagccttgaaaattagagagggggtataatatttgatagcacggcagtgtccatcaagtcttccacgaatataactgatagaaagcatacaataaaaagtataagcagtagggtatatagcaaaagtagcaaaacatgacctggacacatagaaatattcgtaagataaaaaggaaatgttagcccagcaactggcgatactctgatagatataaggtcgtgtgatggcagaactgggaaaaatgttccggaatcatgtcataagacaaaaaaataatatcactttccatcgtagatttggtcgggggtgagtgaaaactggcctttctggatctctctcgcatcgacttggtccggcttgacgtatctcgcggtcaaagcaaagcgcaatttgttctcaggtaccaccgaatgctgtattggtcagatttgactttcaatgttggtaaagagtagaaaaccacaaacctcgtagtatttctggagatcctctccgtgcatgacaacaagatcaccatgattaagttccatcttgatggtaactggggcctctcttcccttgcggcccattgccagagcacggcgagagtcatcataatcagattgcgagatctcaccagcatcgaactcctccttcagtgtccgccgttcaccctcaaacatgcagtctttcagaacagggtcattctgcagaagggtcccaatttgcctgggctcagcccttcgggtagagccattgaaatacttatacttcatgcggacgaacatagttgctttcgctccaagagacagtgtggcgatactgggccccagcgaggactcgccgtcatcatggaactgatagaagaaaatttagcacagattattctcaattcacagctctgacttactccgatcttcatttcctcgaaatagccgagcgtcagtagctcatttggaggcaggtatttatctccagaagagatgactgccttctcagttgcccatgacaaacggcccagagcctggagcatgtcattaggtgcttcatcgaagcccttggaatcgacagatacgacatatttgtagggcataccctgtgtaatctcgtcagatagtggacactaaaatgtcaaggtaatgttgtcacttacatagttgacggcgaaatgtgaggtcaatgtacccgcaactgtttcaatgtgagaaatatttctgaagcttggatctggctcacttacctagactggactgaagctgaaatcgtttgaggccaagatcatcacgttggagattgatgaacaggtcgtctggtccattcgcacggctattgatagctttgttggacacaaaatgggtaatcgagccaactccatcaagtttgtaggtcaactttcggtaaggaaagaaggtcttgtcgtcaatctctggagtgttaaacttccgatcaaaaataattgctcgcttgatcggggccaactcgaaatgatcgaggacgactcgaagcgaaacgggcttcatgttcatgaacttttgaaaagggcagcttttcgcacattcctcgccaatagagtcatcatcgcatttccaacctcgccagaaagttcgtcggatacatttgaaacacatagggcacacaattcccttccaggcaatacgagctgtgctaacatccgcggcattctcatccaatgtcaacaaaagatcagggactagactgtagtgtggctggatttctgggtccggaggactgcgaaagctcaggaaatcaggattgaaagtgagctcagcgggaggggaagcgttttcaatcttccagaagtcgacgcaactagggtcaaggcacatccacccatcctcgtacaagcgaatactttccgtagagcatctctcacacttgagggtttcgggctttgtttcaaagtcccgtccatgaaggggcactggtgggagagagtacttggccgcccaccagctcttttccgcgaggttcagtttctcaaagcggactttgactccgtgtttcttgccaatcttttcaaaccagacattggtaacacgaaaccagtccataatgttgtaccgatgcggaagctctcgattgagaatcttgttcttgctccctaaaacggtgattagcggattcctttaaaaaaaaccctgataaattaccaataacaaggccaacagcaagcttggagttttggctggcgatgatgctttggacgagtgaattctccgagtcttggttcttttcgagtgtcaggtttccctccgaatccttggtacagcatccaccgctaatagaagttagtataggcaagtcgttactctgaacaaggaatccttacattcgggtaatgatgatctcctcatcgatataagtgcgggtaccaccgtcagcatcaatgaggaagccataacagaaaccttcattatgatacattgcaccttgggtgcagcgaaaccagggaatagcatcacaaagttgttgccgaccctggcagaaaattcagtatatatccatatgggttataaaagatgactagcagcatacctctgaccaggctggtggtgttccataaaccggctcaagagcttgatcattgacagcaacttgctggtccgatgagactgtccggtatcagtatggtatattcaataataacagtaaaacaaagacattgtcacctttgctggcttgttctttctttgttttggcgatccggcctgttcgcactggtctttgaactgcctggcgacgattgacagtagggcgtggtgccatcttgcacaactgttgtgcaagcaagctagtttgctatgaattaagtaagtattgtcccagaacagattcaaactgccaacagaatcatattcgggagtggaggttgatcgtcagactcacagtacagagggcccaatggcatcatataaggtaaattggtgttctaattgtgctcagtataattcttcagacagtactcagctttgagtaaggatctaatgcttgagagggatgaaaagtgtcagtggatggggtgaagggtaagacgggaggatgatagagctgggtgagggcccgatatatattttgccagagcggcaggggcgaagctggcagtaaactttggaatcacgttacaagatgagctaatcatgaggaagtccattgctgatgataaactttaaagtacaagcaaatggcattatgttaatttgatatgagaaggagaccgagaaccccccaagattgataccacaatgagagcacagatttcgttgctgacagcccattgggcttgtcctaggcaggagatactcaagatatgatcttctcggttacaggtggcttgcatatgaactagatgactggaatatgggctacttgggtaaatgattaacaaggatatgcacgccataacttacttcaactccacgtcccatagcagtagattatgaaaaacacctctttacactagctatgaattacacagaggtcaccagggcaatttaagtttcagaagtgcaagtagaaatgatatggtgattcatgtgttgccacagcacacgatcatcaaagaaccagggaggctgggagtgaacaaagaactgcaatgtctttgttcaccaggaagtccagagctgcctgcatgacatgtgacattgacatcgacagggaaggtgcacggcacctaggaacttgaggaaggtacgtgttcctgggggtataaaaggtctcctccccccatttctcttcttctcttcttcttctctcctccccattcctctgaccaccatctcaccgtagcccccgagacagcgttgacagagggacccgcagtggcccatttgggaaggtacgtgttcctgggggtataaaagggcccctccccccatttttcctcttctcttcttctcctctccccatccctctgaccatcatctctccgtagcccccatgagacagcgtaggcagagggtgccgtagcacatgctgcttgacctaccacagggatcataacattaccttgtttgttatgaggtccatgtaggtctgcatcagatatcaaaccgggcgttctcgtggatgttcctgaagtcgtggctctcattgccatttgacaagtcccacagaatacatgaggggtgtaaatcttcgtagccgaggacgcgaaggtagtcaccagatacattactcattcgtctggtttgtcctatatgttgaagtattatttagtgtatttcgagaatagtgaaatgttattgtctaaatgtgacaagttgtcgtttcattctgtagataagtagataatggcttcaaaaaataaagtgttggcgccgttgaagatatcccgggagcgaaagcgggcgaatgggattcgagtgatctgcacgccaagcccacactttaaatcccacgaggattctgctgtttattgaagtttacgagacagagtgcttgattgcttggttttcgggaaaattagggcttgccattcatcgtgaaccagatttacacctagtacatccttggcagctgaagttgatggatacatattgatgataccctcggatacgtatagaccgaggcataaagtactagcggcatcgtgtcgttggagaacctcgcaggtttgccgagcttccccgcatccgtcacttttccattaaatctcccctcagctgcttccaaggttattgcctagtccacgtgtgttcgctagaccccttgtttattcgcactgccatatatatcaactgtgggtaaaccgtaagaccccattgcgctcacctggctgcagctaacctcattccaaaaatagccgagaccacgtatatcatatcgctgcaactccgagaaactggaaaaatggtgtttttgccggcaaaggatgcgggccaattggagccaatccctgacactatcccaatcagcgagttcatgctcaatgagaaatacggacgagtgccacacgcaggctcccgggacccatacacatgtggtctcagcgggaagtcatactcgtcgcgtgaggtagctagtcgcgttgactcactggctcgtagtctttcaaaggaatttggttgggcgccaaatgaaggatcggaatgggataagacactggccgtgtttgccctcaacactgtaggtgcaatatacaatagcaagaagaatagaacggagcttattctttcgtcttgccattagattgactccttgccgctattctgggccgtgcacagactaggtggtgttctcactcccgccaacgcctcatactcagcctccgagctgacacatcagctgcttgattccaaggccaaggccctggttacttgcgttcctctcctcgccatttcactggaagctgcggccaaagctggtctcccgaagagcaaaatctacctactcgatgtacccgagcagattcttggcggcgtgaaacctccaacagaatataagactgtttccgaactcatcgaggccggaaagtctctaccgccggtggatgaactgcgatggagcgcaggtgagggagctcgacgaacagcattcttgtgctactcaagtggaacgtctggattgccggtaagcagtgcccccaacaacttgaataataactttggctaatcatgtgctgcaaaaaaaaaagaaaggagtgaagatctcccaccgcaacgtgatcgccaatacccttcagatcaaggcatttgagcagaaccatcgggatggcggtggcacaaagcccgcggacacagaggttgctcttggtctccttccacagagccatatctatgctctcgtggtcattggccatgctggcgcataccgaggcgaccaaacaatcgttctccccaagtttgaattgaaatcctacctgaccgccattcaacactataagatcaccacgctgttcctggtaagcatgtctttgctgatgagaagctgtcgaatgctgaccacaatcacttaggtacctccgatcatcattcacatgctgggcactcaagacgtgtgctccaagtatgacctgagctccgtgcggcttttgttcacaggagcagcacccttgggcatggagacagccgccgatttctccaaattctacccaaacgttttgatccgccaaggatacggtatgtggcattggcacttcttacagatacagagccgaaactgatattttcacgcacaggcctgacagagacgtccacggtcgtgagctcgacccacccgaacgatatctggctcggttcatccggtgccttcctccctggagtcgaggcacgcctcatgacgcccgaaaacacggaaatcacaacgtacgacacacccggcgagttggtggtccgaagcccaagtgtcgtgctaggctatctgaacaacgacaaagctaccgaagagacattcgtggacggatggatgcgtaccggagacgaggctgtcatccgcgtcagcccgaatggcgtcgagcacgtgtttatcgtcgatcgcattaaggagttgatcaaggtcaaggtttgtgatgccactggctgatggaaatgttcgcagtctaacacatcattcctagggtctgcaagtcgcgcctgccgaactcgaggaccatctcctcgcccaccccgatgtctcggattgtgccgttatcgccgtcccggatcctcgtgcaggggaagtccccaaggccatcgtggtgaagtctgccaccgcaggatcggacgaatcagtcacccaagctctcgtgaagtatgttgaagaccacaaagctcgccataagtggttgaagggaggcattcgatttgtggatgcgattcccaagagcccgagtggtaagattcttcgccggttgctccgtgatcaagagaaggaggcacggagaaaggcaggtagcaagatctaaaaagtttcgggatggctttgttggaaacttggaagaagcgccaagaaccatttcggtttagaagtatatacgttcacgggtagatagttcacaatcttcaatataatagcttgttgtattgtactatttaccgatagttattaatctctgttatgtaagtttaagatgacgagatcactggttcttgaagcccttgagattcgactgcctcgaggcttcaagtatcatttaagtggccctgaatgataatatagtatttcaaagagtaagtaacaaagctttcaagccacttggacattgctatctccctgaggggcctctcgagggactgcctgagggacttcctggggggctgtctggggagctgtctggggaactgtctggggggctgcctgggctgtctgtttgctcaggatttgatcaactgcagctgcaaggccacggcacagcccagaccaggacttgcgttttgagaaaatctggctcacctcggacagcagacgcaaggagcttgctttgcctgtcagacttccgactccaactaggttgagcggagtgtttgggccttcggcgatccaaatatgaatttccctggtgtctaacaagcgaatctccttagttggggcatccggctttttgatctcaggatcgaccacgagctcgtcgaatgcccatatatagaagaaagcgataaggaaacagagaggatcatggcaggaaaatttctgcttggctttcaatgtgctgtaaacacatacagcatgccacagacatttcctggcactaggtgcattgttttccatccaatgtttcaggatacttgttgtcgtatcgacctcggcttcctcgccttgccaccctgagaatgactcgagcatctgaagtgatacttgccggagaagagacagtatatgatgaatgacatctcgagcggcaatatagtctggtttggctgaggtgggaatggccgcgaatatctcgttcatggaccgaaacatcattgcgcgcagagcagaaggggttgatgagatatggtcccatcgctcctgaactggcacgccggtcacttgagaacttaggcccgatttccaaatggaagaatacgacattttgtcaaggaacagtctctcctcgctgtaaagagacagcatgtagagatttcggcggtaagcatccattcctgccatggtttcattggcttttctgacatcaagttgagtagatggaggttgtgatacatctaaaagttatggtcaatcccggagatatctgataacaaaaattggctcactttgatcagattggtatacatggacgaaattgtcggcatttctacgacaccatagtgattggcgacaggggaactcctcggggagttcatgctgcccaaatatcggctgacgatcaaataaaatgagctgaagacattcgagttctggcgaatggttagccaggctttcatagtttgtcgcaaggggcacatacgaaagatacaatgaagtaaacgtatacgagattctcttgccagccaggctctccactgtctcggggcttgtgacgtttttgttttcatgcattgatcaaccttcaagacacgggccaatgtgacgagtacatttcgctcatattgcagcttcaactgcgctttgtgcgacccgccaaacatcaggcagacatcactaagaaatacgctttgtgcataggataaagttgttgtttcgggtgattgaggttgctaatttgattaatataaggtacgaatcttcaccaggagatgaacttacgttttgtgctattgcctgacacaatatgtcgccgaaagatgctgaaaattgactggcattgccgaaagcgctatactgactcccaacagtgaccactgctaaaagtaccatccacgaggttttgtcatgcccaaattctagagcatatgggtgaaccacggggtattcatgatcgaagtgttcaaaatacaagtgcacaaagtcttggatgaccctccaccatggaaatgtcgcatcttctgtttctcctaggctcacaagaaatgccttaagtgattcatatattgagatgttggtcatcacgctgtaacgaaattcaggcaacaaaaatcgctcatctgaacgccgcatttttggaagtgacaatttcaactggcgggttgacttagaagggctggctgcagcaggagccgcaggggcacgagcacgaacacgagaacccggagccgaaacacgcggacggccccgtggacgaggagtcttgggaggtggtgttgcttgcgatgctgggccattctgatcattttccgagtcgtccgatatttccatgacatcccgcgaggcatccatggggtcctgtgtagtgaggtctgtagcaggcacggccggacctggagtagtctggtttgttccatcttcattcaatgagaaagatgatgtacgtatgttagatgaggagccctggtcttgaatattctgcggagataaaggactcgtctggtcagactgctcttgttttatatcttttccttcatggtgtttcctcaaatgagccgcaagcctatgtctgcgggggatcagaattggaacgtcgtatgaataggaagtgcctgcagcctagagactatggcataccttcgagtataggaccttggacaaaaacggcatttaaactctttcgaccccgagtgtccccggtcatagcattgttgtgacagtgctgtgccgcattggtcacaagtaagatggagttgcgggcgagtatgagttaggatatggcgtttcagatggtgtttacgcccgaataccttgtcgcattgctcgcatgggtaagactcctgcaaggggttcatggcttcttcccactctgaagcacatagatcaattcaaaaaatcaatgcaacctgcaattaaacagtctacaaccaggactgtggccatatattcacaaaaaatccagtaaatccagcaaacacctaccacgacgctatttcgcgtgtcgcgctgacaccaaagcggtcactaaagcggtaagagacagagcataatctgccgcggggtgtggatttctaagcggggaggtaagaaaaaaagatcgagggcattttaagttgccttaacaacctacttcttgcttcaagattgtttaggaacagcttatatcagaagggactgttaataaatcactcctttcgacttcatatctttcatatcgcaccgatccacggattgaaaaaataataatgtcttcaaacgacccgcaccacgagaatgaagaggactatatgcaggccgacgatgccgaagagatctttgagcgggatgaggatcaccctatgtcggagggagaaggagaatatgatgatgagaacatgaccattgaagatgagatcaccttccaaaacgactcagtggcacacttcgactcgcattcagactccgtattctgtgttgcgcagcatccggttcacaacaatatagtcatgaccggttctggtgatgacacaggctacatcttcgattcgacccctgcaccgcgtccagtgcttccatcaagctatgaatcaaaccctcagccaaaggagcgcgagtctctcgcgcctctggccaagctcgacggacacactgacactgtgaatgccgtgactttcaccgaacccacaggagagtatgccattacggcaggtctggatggcaagctgcgagcttatcgggataccacaccccagaagaccggactcgcatgggagttctttggcgaggtccaggaagtggaagagatcaattggatggccgtgtgcccctaccagcagggaaatgaagggactcaaaatgttattgccatcggcgccaatgacggcagtgtgtgggtcttccgtatcgatcataccgaccccgggcagcctatctccatcatccagaccttcttctcccacaccgaatcatgcactgcaggcgcatggacgcctgatggaaatctgctggcaactgtttctgaggacgccagcttctatgtttacgatgtctttggagctgctgccgccgctggtatcgagtattcccaaggcactaatgccatccttggattgactgcggaggatcagcgcttcgctgtggagggtggtctttacaccattgccatttcccccagcggcggtattgctgcagtgggtggtgctgagggcaacatcagggtcgtcggccttcctcgggtcacagcaagtgtccctgcagccaagggcaagggcaaaggcacaccctctcaggcagccggttccaccgctgcaggaactatcatggccgcattgcagacccaaacggacaacattgagtcactgtcgttctctcaggccccattcactcttcttgctgctgggtctgtggatggttcgattgtgatgtacgatgcggctcatcgatttgcggcccgtcggcacattcgggatgcccacgagggaagcgccgttgtcaaggttgagttcctgcctagcagcaagcaactcggtgcaactgtctcagggccccttgccaatgctcccgcagcccaccagaaccgctcttggatgctcacgtctgtcggtctggatggtgtggtccgacgttgggacgcacgtggcggaactgccgcggcttcgcaaggattgatgcaggagtggaagggacacatgggtgccacggaaaatgatgagggcgagcaagccggtggcatcatgggctttgtacaaggcttcgatggaaagcgtattgtcactgccggtgatgatggtatctcgctggtattcgaggagtagcctgcacaaaaaaagtttgagaccccaaatgcatagtgggggttcatgtcgataatgatattacgtgtttatagaagctcacagccaaaccaaccttgataaacagctcatgatatacaaggcaaaatccctgtagagtcgatgaccgatgatcgaacaataaagaaacatggttgtagtagtggaacaaaagctatgtacattcgacaaatcaaacccaaagcgccatctggaagctacgctccgtatgagccatgagaagctgcatctccgccctgacgacaaaagcccccggacttggcaaagctgtaggcgctataatccaaaactcggctgtggttctcgcggaggcgagacgactcttttcgtcgcctggggtatagatcctccgctcgataatccgttggtcggcggcattctcaattggtctccagagacgacccattagtggtgctcttcaccgtggtgagcatcgccatggtggtgatcatccttcatgaagaagtgctcgtatgtgcagtagccagcgaaagcgacagtcgcgataccgaagccggggaagagacccttgaagcggttgaatctgctgaaggggccgcagtagcgccaggtctcactgtaaatattagtgactaccacaattggaatcacatcggcatcacttgacgtacttgcgagcccatggatcccgcttggcccagatggaagatggggaggccgcggccttgtagtcggccatgttgaaaccggtggggttgggggcgtgcattgtgggtgttatcgggtagtcaatattacttaaagacggaaataaagagaaacaagatgtgagagactgcaaattggtccctaagtccgcaatcaaccgcaaagtgacacagtgaggagccgaagatgaggaaaagaggtgtgcttggcaattacccgcgctaaccgaatacggtacaccaagtagctctcccgccttcgagggacgaaactgtcacttcatccatgcgcatcttcgagacaacaaaatgccacctcccgttggcagatatgggccatctggcttgaacgctccatacaacatacagcaagctcaccttcaatctcaacatcccgcacacgcacagtctgggaatacgctacctcccccttcgcttggtcaccctggcttcgcgggcaatccaaataccaacatcaatcctttcacactatccggcggaattgcaaatggtatggcggtggccggctttccgggggctggtgcaggtgatggtggcggcaccggtctggcgagtcatgcggcacagatgggattcgcgcgcggtgcgcaaatgcaacaacagcaactacaccagggtcacgacggtcgattagcactcgaagcaaagggcgctgcggtaaagtcaaggattagagatgtttggaaacacaacctggcccatgagatggcggttctgagacagttggtcgacaagtacccttatatcagcatggtaagcaccactacgtgatccgtgcgaaactgaagtcttctgagagtaacgtttactgactaagacctaggataccgagttccctggtattgttgctcgtccgatcgggtcattttcgaacaaagcagactaccactatcagaccctccgatgcaatgttgatctgctgaagatgatacaactaggtatcacgttattcaatgatgaaggagaggttcccccagcttcaggcaatgatgccaatgggcaagtatatggtgtgcccgctccctgcacatggcagttcaacttccgattttcactagaaggagacatgtacgcccaggagtcaacagctatgcttgctaaatctggaatcgatttcgccatgcacgaaaagaacggcattgatcctttcgagttcggtgctcttttgattagctctgggttggtgctgctagatgacgtacactgggtatcattccactccgggtacgactttggctacctgatgaagatcatgctctgctctcagctccccgaaaacgaagaggagttccacaagcttcttaccatcttcttcccgtcactttacgacatcaaatacctcatgaagcatgccggtcgcaatcaagccgtcaacggttctcctctcacgcaggcggcagcacagattctgaccaatctaggccagaaatctggtttgcaagacattgccgatgaacttggcgtcaagcgtgtcggaatcgcccaccaggctgggtcagattccctagtgactggcgagatctactggaagacgcgccagctcattttcggaggggaaatcgacgacagcaaatattccggccaaatctggggcctcaacggacaaatgcccgcagtggcctacaacatggcccagcaaacgccgaacctcaatggtgccaccatttactccggcggaactcccagcactcccaatactgggtctcacggagctggcgctcatacacctcagcaccacggcgctggctacaatgccccaactcccggagcctatcaaatgggccgggtatgaggcacagtctgtgtagcacctgggttgatgtgatatgatgtatgtacatagacacgagaacatcgtgttattttccttcgatattcggcattgtcttcgcgcatattactttgcatgggctctctgtctgtgctaggttctgcgtctagacgacggtgttgggcaggaaggtgcctggcgtttgatatggctggttttgaatccatttacgaggcgttgacaggctctattatggccttgggcctttcgttcttgtgatctacgtcgctttttgtttctttcttgttgtagctagatcggacctgtctgtgtcctatgtataggaatcatggtttctgttcgctcaatttgcctggttttgtagatttatgagctccttttgcctgtccatatctagggatctgctcggatgagaggtccgcagttgcagatttaattgaggccaagcacacgttcccaattgaggattctcatgcgacatgcctgttttctaccccgcgatgtgacaaacgacatgaataacgcatagacgatagctgcagacaagcatctctttgccgttttgggattggagataccacgctaaccccaatcaggatatcagatccggcctccgcaaatatctatctaatcgatagaggtataactgcagggctcgggacattttcgagataccacctgcttgttaaatagctcgcaagcccagacctggaggagaatcaagtgagttaattgtgttcaactcttcagcactgcttgactcgaattggcactttaccctcatcaccttgaagtcatctccttccatatacctctagcacagcatggttctcgaccgactacaccaattgactcaccaggtcagcgctactgcaccgccacctcatccacttgatcctctgtctacggtggaaattgatgcggctgtcaacattgtccgcaaagaacatggctcgctcaacttcaatgcggtcacactatacgagccccgcaaggcccagatgatggcctgggtggctgatccagaaaatgcgcctcgtcctagccgagccgctgatattgttgccattgcgcctggtggtaagatctacgatggtgtggttgacctggaccagaagaagatcatcaagtggcagcacacaccgaatgttcagcctctgatcactatggaggatttgcaggaggttgagcatgttgtacgcaaggatgctaaggtcatcgagcaatgtggtatcattggaattcccaaggaggatatgcataaagtatactgtgaccgtaagtggacttccctcgtttgtcaaagattgatattgaccaaatggtattatagcatggacaattggatatgatgagcgctttggaactggtgtccgtcttcagcaagccctgatgtactatcgccctcacccagacgactcccaatatacctatcccttggacttctgtcccatcttcaacgccgagaccaagcagatcatccacattgatgtgccgtctgtgcgaagaccgctcagcaaggcgcctccaaacaactaccacccggcctcgatcgaaaaagaaggaggataccgaaccgatcttaagccaattcacatcacccagccagagggtgtgtctttcgaggtcaaaggacgcataatcgaatggcagaactggaatatccacgtcggcttcaactaccgggaaggaattgtcctgaacaacatcacattcaacgacaagggcaatgtgcggcctgtattctggcgtctttcaatggccgagatggtcgtgccatacggcaacccggagcatccccaccaacgcaagcatgcatttgacctgggcgagtacggcggtggatacatgacaaacagcctgacattgggatgcgactgcaagggcgcaatccactacatggacgcagcattcgtcaaccgggcgggcgctagcacaatcatcaagaacgccatctgcatccacgaagaagatgccggcatcctattcaagcacaccgatttccgcgacgagtcgatggtcgtaacccgcggccgcaagctcatcatctcgcagatctttaccgcagcaaattacgagtactgcgtgtactggatcttccaccaggacggcacaatccagctcgagatcaagctgaccggcatcctcaacacttacgccatgaacccaggcgaggataccaagggctggggaaccgaggtgtaccccggcgtcaacgcccataaccaccagcacctgttctgtctccgtgtagacccgaacatcgacgggccgaacaataccgtcttccaggtagacgcagtccaaggacccggtgaagtcggcagtgccgagaacaagtacggcaacgccttctacgccaaaaagacaaagttctccacacccatcgaggctatgtccgactataacgggtctaccagccgttcttgggacatggccaataccaacaagctcaacccatacagcaagaagcccgtcagctacaagctagtcagccgcgatgttcctccccttctccccaaggccggcagcctggtctggaagcgagcaggcttcgcacgccatgctgtccatgtcaccaaatgtgagttttgcaatttcccccttctgatatcgtgttccttttctgacttcattctctagatgacgacgaccaagtccacccagctggccgccacgtcccccagacctccggtgagccttcggagggtctgccggcgtggatcgaagctgctggccccagctgctctattgataacaccgacgtcgtgctctggcatactttcggtctgacgcacttccctgcgccggaggactacccgattatgcctgcagagccgatgacacttctgctgcgcccgcgtcacttctttgaccgcaatcctgttctcgatgtgcctcctagctttgcgcgcacacccacgcaggtggctgctaatgcgagcacatgtgcctgcaagaagaatgatggctccagtgttttggtttgatttgagattagacgttgatttgggttattgattttctcagcgtgcacttcttgtatatacactttttggcaaacgaaaatgattactgattcttgatctactttctgatttgcgtgcttttatatagcaggtactccgtagctgtgggcaattagggcaactaactatagatagcccactgcggccactttatctcattgatatttcaaactcattcagactgcactcgtaacaaaaaaaaaaaaaaacggagaaggaaagaagttgtaatgtcttttaatacgagaacagggaaatccagagatatgcatatcagagtataaacctcgcatgaacgcctcgaaagatcccaacaacaagggaatcatgctcagaaccaagtaaaccataaaagcctcgacacaatgcctagccaacacgcagaaacaaaaagggcagctgtgcaagagaaaacaaatacacggatagagcaatattctatgcggacaatccccgcaacaaagccctatcaacctccccgagcaaggaaaacaactccttcccaccctccgaatccttcccttcgatatcaagcgacttatgcaagaacctgcgcgcctcctcatagcgactcatttccgcaagacacttagcaatccgccaccaagccttgacattgccaataggcttcgagtcaacactagccttggcatcaaccaacgcgtcaggccaggcctgcattgccatatgggcctgtgcgcggttcgcataaaggccggacaactcctcgcgcgcaacgcctataggctcccagcccggccggctcagcgccatgtcgatggcgtacgagtatagcttgattgcttcgtcgtagttggatttgcggtgggcggcgttggcgctgtcgcggagtttgctgatctgcgcgctgcgcttggggtttacaggcaggggtgggggtgggatgttcggggggtcgaggctgattagggcgcggtgtagttggttgagttcttccagttcggcgttgattgcagctgtttgggagggtgtttgtgcggaggattgtggaagtgagagcgctttggtgctggggtccatgtacaatgggtattggttgtagatatcgatttcactggccattttggggcgggggagaccgtaggtctcggttttggggttgtaaggtcggtgttgcttcttggagttgttagtatatgcgctgcggtgtgcctgagcgggtgtttggggtgtggaatggaaaggtgtcattgcggaaagggttaactcatacaaggtatagttcaggatacgctgtctagttgttcgacaagcaaggttcactatgaggtcaatattcgtggttgtacttgtcaagagatgatgatggcaagagggcaagctgtccataaacccgctgataggaaaggcggtggcagaataattgtaccttgtagagcaggtaatagaaaggtgaatactactatggcttcatactgaccaaaaaggatcttgtttgaatatattgacaagatatcagccttcgagatatcatctacgtacgttgttgtgtatcaaagtattttcacctacaaaacacagagacatgattcacaaatgcaatacatgatacatctatatattgctagctccaatgaaacaaaagcaggacatacaatcgtaatcccagtgccaaaaaaagctcgtgagaaacacagtaaagacggacatcagcccaaagtaaacagcgatgcgccaacaccgcgctccatggtcaatattcaaggcgcaaaaaaaacaagacgactcatcaatcatccgggtatttcactgaaatatgcctccatgtacaccgacaacactccttactcaactcgcgtgccgtccgtacccactcacagatgagccaccaaacccagtatgagcggtgtattcagacggggtgtattccgacggattgtaatgagtagacggctcgtactgactagatggctccacatagtgctggccatgcgcaccaccgtaaccagtactgttataatcatggaggacgcctccaggggcggtagcggtgggatcgtaggagccttgcatcgcggtccggccgtgtgcgttgcctaggtcatccacctcactctgatgcaggagggcatagtcctcgtcctggtcgccgagggtcgatgggcccatgttgccgcctcggccggagcggatatcgtcctcgtcctcttcgaagtcctgggctgggttcgatgagaaggcggctttgctctgtgcggcaaaggtgggatcggagacggcgtcggggagggtgccggtgcggcggaagtgcgtgacattgcggaaggacatccaggaggtgatggcgaagaggacgctttttgtatgttagtttcaccaaggaatcgttggatcggcggaaggaatgcacgtacaagatgaaaacaccgataattgtagttgcctcgctcagcttgcacttggcagcgctgccgtatccccagttatcgcatcccgtcttggtggtgttggtggtggtagtggtggtcgtatcatcggctctcttagtagtagtcttctcgtcgtcgtcggtggtcgagcccttggactttccttgggcgacataggaagcgagacagatccacgcactgagccagagaatcgaataaaggatgtcaacacaggcgaaggcatagacgttaccgaagcgtcgagctcgtggccacatgggcactgctactagatagaccaggccaggaatactcaaccagcactgccatgcggtcgtatgtcagaatgcaacttttttttgtatcaaaacgcaaaactcaccaaaccccagtaccagcctgtgcgcccatctatgccatctcctttggtccagatagcgatggtcaaggcccatgcgaggaagataataaatccttgtatgaaatgtattatattcttcgtccgcccgaggctgccgcctgacgaccgcacttgaaacatgtcttgtgtaggagcgctgcaagggtgttgcgctttttgtattcggagggaagggagtggttggtgtcgtctatcgtgaagtcatacgggtcaaaaaagatgagagatgagacaaggctgaagaatgagacccgatggggtcttggcctggctgaagctccgtggagttttgttttgtttttgttttgttttccagtcgcaacgtcgcaactgtgcgattatttagatcacaacgatggatatatgtaaattaaggactttagatattcaatccgattgatttgtctctctgccccatcctcttatttctacagggcgtacgtaagtcctccacgtccgctgcccaggcgacagcccgttactattttgggaacttcgccacactctcttttggcttatgcgtatcattttacatcatagtctcgtttctcgtatactcatgttaacatacataataaaggaaaatcaagccaaatcaagccaaatcagtcaatcccgcctctcgtgttcgttttatcaacacccagatctcccgtaatggttgatagacatgtacatgccaccaccagggaaccggatcaagaatagagaacagcggatccttccagaacagcagctgcactatttctacctctgcaacttctagagctgtgagtgccatgcgaaagaccggaaacttcatgaaagtagcaggaataatggcggcacgggcaaatgctggcgctgaatcggttgatgacagtgtggctgtgacattggaagtatcgactcgattggatgggagcacagatagatagcctgaaacggggcaaggtacattgtatagcggatgatccacaggtcttgcgccgagtgtacagccggcgatgtagatagcgtgtcggacagaatgcgcctcaaactcttcatcgaccatgagtctgacgcagagatgacccgtcaaacgaacatcacctttggttaccaatttctgcatgaggctatggatcgaagctgccagagccttatccaaacgcgatgtaccccacgtaaacggaccagaatccgaaaaccgaactctaatggcttgaacgtggccacgcacaatcagtaggtctgcgaatagctctccaagacgagattgttgctgcagaatccaaggctggtccttggagatctggatctcgctgatcgccgagtatgttttgctcagcgtagtgctcggcaacagtatagccttctcactcgcagatgggcttgctcgtgagatatgataggcctttgaaggcgaccggtgcaaaatcttgtgcacagagtcgcgcgattgaaccctgtgatgctcaagcaccggaaggcctttctcgatcagatactgcctgaaagaatcaggatggccgaagcgaattgcgcaggtgacatcgaaggtgatgcacgtgcagctagtgtaaccctcaatgagctgtcggaccatcgcatcttccacgggggatgccttgggcgaacacggaatccatatgtcgacattttcgcggtggataatgtcagcgacccgggacatgtaatggtccttgggaatccggtaaaatgccaccagagccttggacatgctcccaccggagcgtacgggcaggtccaggtctgtaatatcggctccaaccacgcgatggccttctagagcccaagaccttgccagagtcagaccgtgggctgtccctatgcccgtgataaggactgttttcggggaaaagttctttgaacgtcgagtggctggtcggagataggctatcaataccgcggccgcgagaatgatgttatcgacaaacaacagcgataatgaaaggcatactcgaaggatatgccagaatactcgtgacatagtacccgataaggctaaagctttggcagatttaatcgacatgctgagtctgagtacaataatatcgaggattatggacctcgaatgagcagcctcgagtacttatagtagggcattatcgctggcaaggcgtcgtcgctggcaaattgtggaactgtcagttggaggggttggcaccactgaaggcccgtgaagggggggggggttgggctgcagatctagtgccgtgtgacgatgcatttttcgcgttcaacattccagcacttaaatagttcaagacccgtaggaaatccgtagaagatcaagacctctgtacaaattgaccaagagcaacctacaggtacatatatgcatgtaggtaacgtgcgtctcgggtctaaccgcaggatgtccggcgatcacatgcgatcaacgtgggatcaggtttccgatcatttcccagttgtctcggcgctgattccctgaagggatatctccgaggcgcaggagcttggcctgaaagggtaacgccatcgactggtgaatggtgaattgggcgtggtccgactcggatttactgtctctccccgaagtattccagttatccccgaggccgtttataaggtcgcatatccgcatggaatggattgtttatcagattccgtctagtttactgcacgtcatgtctcaaccaggtcccgcggtaggaattgctttttgattagattgagaaatgaacgctaactcatactctagagcgacgccggcaaggagctgaagctcctgcattacatctatgaacagccaaatctggatgaaatccgcggccatccccaaaaggtcctcgatctgattcacgagtttgagaaaaactaccattttatgaacgtcggcgccgagaagggcaaagtcgtcaccaaactcatcgatgaactcaagccaaagaccatgatcgagctcggctgctacgtggggtactctgcgattctattcggcgacgcagttcgtcgaaacggtggcgaacgctatctgagtctagaactgaacccagagttcgccgcaatcgccaatatgctcatcgagctggctggactgcgtgactttgtgcgtatcatcgtcgggcgaagcgacaagtcgctgcacaaactactcacctcgggcgaggtgaagaaagtggagcttctcttcatcgatcattacaaaccggcgtacaccacagacctcaagctgtgtgagcatctcggggctattgtgccgggttcggtgctcgctgctgacaatgtcatctacccgggcaacccaccatatctggaatacgtccgtagcacggtcgaacagaagcgcgaagcggcgaaggccgggcctgcgcaggcgtataatactaccgggatggccgaacgcacggtagagtcctttgtgggtaaagatgacgtgccgactttccagtttgtcgggaaccccaacttaatatatgagagccagctatgtcaacccgagggattgcgggtatgtttgcatgaatccccgagaaatttccgtcgctaactgcaagggtaacaggatgctgtcgaggttacgaggtgcgtgggggtgcaagaggcttagatggcgcatagccaatgacgcaagtgggatgatagaggggcagaagccaagatgtcaagaatagaagaagaatacggagtacccgtggactccatatgattatcaaacaggcgcagagtgctccgagtagaaagttgtatgtacagtcgaccattacccacttcatcggaaccggtaccccatcggaaccggtgaaccccacccgttgccgccaggaccttcctatgtctccgctgaatgaattccgggggccctataaaagggtctcgatacccactgattacccctcaattgaatcacaatcgatatctcatcatggctaagacttacaacgtcggtattgtcggctacggcttcagcgcgaagatcttccacattcccttcgtgacggaggttcccgagctcaagctctacgcagttgtccagcgcacaccgaagcaggatgacgatgccgagaaggaccaccccggtgtgaagtcgtaccgtagcgctgaggagatggtccaggaccccgcagtcgacgtggtgatcatcactactgcccccgactctcacttcgcactgtccaagctggcactggaggctggcaagcacggtagatgcccagaaatcccggatatcagttggtatatatactaacgtggaataatcagttgtctgcgagaagcccttcacccccacttccaaggaagcggatgaactcgtcgcccttgcaaagaagaacaacaaacagcttgccgtataccagagtatgtctcgtcacctagcttatccaaacctctactaataactgcctagatcgccgcttcgatgccgactacgtgaccctctccaagctcgtcaagaacggctcattcggccgcatctccgagtttgaaacccacttcgaccgtcaccgtccagaggagccggccaactctacctcatggaagaacaaggtcatccctggtggctcagcgatctatgaccttggaacccacctccttgatcaggtcgtgcatctgctcggactgcccgcacgagtaaccgctttcattggctccgcccgggagcacaacacgacttcatacgaggactccttcaccgttctgctgcactatgccaacggcagtatggttaccgccaaggcgactgtggtcagccccgaggaagagcagctgcgcttctgggtgcgcggtaccgagggtagcttcaagaaggtgagagcaatctactcacgtagatcactgcgatgtaaagaaatgtgaatgctgacctaattgatagtaccacctcgatatccaagaagatcagctcaaggccggcatcaagccccaggataagggatacggtcgtgagcccagtgagcgttacggtactctgacaaccatcaaggacggcaaccccgtcaaggaggtggttcccaccgtcgagccccccacttacaccgagtactaccgcaagcttgttcgcggtcttggtggcgagggtgaccttcctgctagcggcgcggaggctgctcaggtcattcgtttgatcgagttggctcgtgagagttccagcgttggacgtactttggacgtctaagctgtttatgcaaataatgattatgatatactcgataaaggcaaccttgaatatacagtgaatcttggatatagttctttgactccaatacacatcatgaatacccttgcagtcggaaaccaaataattagcgttacgcaaagcatctcgacagccaaaactattgatgtctaataattcgtcttcgtttagatatacatgttcatgttcatattgctgcctaacaagggcctggatgcgcaccgtcacatggtctgcacgaggggtctgagcagattttctcttcgaacgggaagctttccaacttgtccctgaaggattgaatcttgggctaagagatattgtgatggacgtcaaatcactaccagagtttcgattcttcccatatcccaaacatccatccgagtctcaagaattactaccagatgatccaattaccctcaacacttcgtcctcatggacttactgcggacccctcttgacccttgagtcatatagcctgccatcatcctttaccacctgggcagatgccacaatcaacggctcaatattgccctccttattctccttcctggcatatgtccacgaattcctggccaaaaacaaccaatcccactactggctcaccatcagagcaagcaaaagctcggacgagttcgataccccacgctggcacacagacgatttattcttctcccccctccaaccaagaaaccattcaagacgtgaatcgctcttctcgccaatcgctaatctactcaaatcgccttggacaggctcaacaaagaaccaaaagcccaaaccccgaatcttaccctccaaaacaccaaccaagcatcacgatcacccacgtcccacatctccaaccgcccaaatcccctctacaagccccgccccaacaaactggaaactcacaaccaccctcctaggccccggaaccatgttcatcccaccggcgacgaaccgcctagcccgcaccacacaacaagccgccaaaacagccgcccgcgccgcagacccagaccacgtatgtgtctccgtgcgctgcgtcgggtgcgccatggcggccgagtcggtgcgggcacggctggtcgttgagctgggtgggcacggggttgtgcaggcgtcggcaggggagtgtgttttcttccgggttggcgaggacgatggcgcggtgcattctgagcctcggtcgcatggtgatcgggtttttgttaatgttgtccctggtcatgaggcggatcttagggcgctgatggtgaagtgggggatggagtatccgcggacttggtgtgtggggttgccattggtgattggggagggagaggagtgtttgagggatgttgggggtgagatttgattgttttgtttatgataccctggaagacatatctctattatttagtatagacgggtgctctgggcgtatatcgcaatagctgggaggtatgagtttaaggcagtcaattgcattcttttaccctagtgatggtcatttcagttgcgttgacccaagaatagccttaagtcttgcacgaagatccggctaatgacgatatgccaagccgctagtcccaaatcgtagtttatgttaccaaatgcaaatccactgagtggacgagaaattagacctggcatcgaccttgggagactcgatatccgcggagaaagagagaaaggttgcgttttagaccgcagaaggaatttctcactaagggatagcggtatgcggcggataggggttattcctttctattcccgacaggggtgaatccaacatcgagatgcgttacatgggatttggtgaaacccaccagagcctacaatatagagcatattgtgcccatcgcataagtccagcatggcgacatccctgcgtgaaccgatgacgctatcccgtccgacgacctggaatttcgatatcgatcggtatctgaatccctttgtaccggcgccacgatggcatctcgtgccaaggcctgttgcatatatgctgggatatcgggatagaccacccaagccactgggcaatatcgtggtcgccttttgggcgtcgattggagcgttttgcggggtggccttggtggcatctgtttcgaaacgggttccttcttttaaagcgcacgatgcgacaacgatccttggcagttttgtgagtcatggtctaatgcgagagtagtggaacaagaacaaccagggctgacttgatgtctctttgatgatgatagggtgcagcggcagttattgaattcggtacgatcaactcgcccttggcgcaaccacgcaatgcaatcctgagccagatcatcgcttgtttcttcggcgtcggaatatcaaagttgttcgccttggacccgcgtgctgaagcgtataccgagctcgggggcgctcttgcttgcgctcttaccacggcttccatgctccttaccaatactatgcacccgccggcgggtgcgactgctcttctggcagtgacgcagtctcagactattgctctgggctggtttctgtttccggttgtgttgcttggagtcgcgcttatgcaggctgcggccgtggtcattaataatgtgcagcgtcaatatccgctgtactggtggacgtcatatcctctgtcgcctcggggagatgtggaaaaggctagtcgaaaggaaagactagagacacctagtgaagatagtctgacgggtatccctcggcggctggtagtagaacagagtgaagtttcggtgcctgatgggatattgctctctgccgaggaggaagatgtgttggagaggatccgtaggagactttgaggggaccatacatatcaaacctcagctgcatgtaatctctccaaatataagccctctccagggccctgtttcacacaaatcaaaagtggcaaattgacacctcaggcaccaaccgcggtgacgtctctcccaatcagaactgacttatcccagcggcccaccaatggatttttttttgttcaaacgtccgtgaaatccttgaacttgccaactcactcctctcggccaaataattaaacttataaagtgagaacaggtcagttcgactctcaatttcttattttctcccgtttctcgactgacaatcgataggattctatcgataagggcaaaccaccaactccactgctcgacgcccctccatttctgtccgccccgccagacgatccactcagcctttttgcatttctcttcaatctctttctgcattgtcatcctttctcctttccctccctttacctctccgtcgtcccttatttcatttttaaaacccatttttttataccgtcacacccgcaaccatggtttccgcctcgaaggctgcccgcatggccaagcgtgccgacgagaagaagcccaagaaggtcaccaaggtcgagctcgatgcccacggaaacccaatcgtcgaggatgcgcctgccactaaggatcagtccgccgttgataagctcacagctcagatggataagcacggtttgtccgatcgtgtcaccaccggtgtgctgtcatctctgcccgcctctcgcgacgttaagatcacctcttgctcccttgtgttccacggaaaggtcctggtcaccgattccaccctcgaattgaccttcggccgtcgctacggtctcctcggtgagaacggttgcggaaagtccactatcctcaagtctattgctgcccgcgagttccccgttcctgagcacatcgatatctaccttctgaacgagggtgcaccccccaccgacttcggtgcccttgactgggttgtccgcgaggccgaacgccagttggaggatatggagaagaaggccgaggaggttcttgaggaatctggccccgataaccctatcctcgaagacctatacgacgtatgtattttcaagttttactctccttggatccagaacagaaactaactctcatatagcgcatggacaagatggatccttccactttccacgttcgtgcctctctcattttgaccggtctcggcttcaacaagtttaccatcaacaagaagaccaaggacatgtccggtggttggcgtatgcgtgtggccctcgccaaggccctgttcgtcaagccctctttgctattgcttgatgaccccactgcccatttggatttggaagcttgcgtttggttggaagagtacttgaagaagtgggatcgcactttgatccttgtctctcactccatggatttcctgaacggtgtctgcaccaccatgctcgacatgcgtggccagaagctcctctactacggtggtaactacgattcgtaccacaagacccgtagcgagcaggagaccaaccaggccaaggcctacaccaagcagcaggaagaaatccagcacatcaagaagttcattgcttccgctggtacctacgccaacttggtgcgtcaagccaagtctcgccagaagattctcgacaagatggaggccgatggattcatccagcccgtcgtcgccgaccgtgtcttcaccttccgcttcgccgatgttgagaagcttcctcccccagttctctctttcgacgatgtcagcttctcttactccggtaagtgggaggacactctgtacgagcacctcgacctcggtgtggacatggactcccgtaccgccctggtcggccccaacggtgtcggcaagtctaccctgctacgtctcatgaccggcaagctcagccccatcggtggccgtgtctcccgtcacactcacttgaagctcggtgtctacagccagcactcctccgagcagcttgatcttaccaagtcctccctggagttcgtccgtgaccgcttccccgagaaatcccaggactaccagtactggcgccagcagctcggccgttacggtctgagcggtgagggccagactgccctcatgggtaccctatctgagggtcagaagtctcgtattgtcttcgctctcctcgccatcgagtcccccaacatgattctgctggacgagcctaccaacggtcttgatattcccaccattgactcattggccgatgccatcaatgcctacagcggtggtgtcgttgtcgtctcccacgatttccgtctcctcgataagattgctaaggacatcatggtctgtgaggacaagactatccgccgctgggacggctccatcggtgactacaagaaccacctccgtaacaagatgttgtctgccggtgccgtttaagggctttattgattctctttgcttgttcaacttttttcaacttctttttttcccctattgatgacgacgaaatgctagacgagaactgaaggaatacaaatgcccacatcgtggcactaaaagtttggatcccgcaaacagggacactccaacaaaaagttccttggattgggatggttttcatttaatttctttttgtccgttagatcgtttgtccttccccccttttccgaatagattttgggttatggaggattggacttttgcgtttattgctatcatgaactcattacccctgattcgatccgtctgtttctttgtcttatgcgtccttgatagagtgtttagtcctcttttccgaggtgaatataagggatgccagttactatatcgtatggcgctacttgtatatatgatatgcttcctcttgatactttcgatgtttccatgacctgtctagatatcttccccgtcagcagtgtcgtgactgagcatcggccgggactagttcgctaattgacaatgcctttcttttctttcttctctttctagttattcttatcccaagactaatagaatacaccatgacgagccccgagcaacaaagaacatcaacaatgatcatagtacctcattgtcttcttcatcttcttgtttctctctatctaaaacaaagaaccaaacccaagtcaccactaacagaacctgcatatataaatacccgcggatctctccacaatcccatcccatccataatctcattctccacagcgacatccgcagccatatctaggtaagccctaacaaattaacccaccaccagaaacccacccacgcacccatgagcacaatggacggatctcgcgtgcacccgcataatttccgagagatctacacaaaagcctgcgaagccttcgcccacaagctgcaatgccaggtattcgttctcctctgcccatcccccagcccagacatggaagagatcccgacacggctggatgagctcggcgagcgagtcatgcagatcgggttcctgggtgaggtcggtgaggtcggtgtccgggatcataaccgcgtgcgtgttcgttgggggtcgcttcctattaaggagatttgctttcagattaagtgggaattggctgttcttaaggatgagattgctggtggtcagacgccgcctcagttgattgcggagcttttggcggagattttggattcgttgcctttttgatggattttatgtctatttgtttatcgtgcttagtttgtgtactccataggtcttgtaggataggagttcgtgtttgaggtctggtaaaaagaatgacactaatagtataatcacaggactgatggggtttcaatgtcgttgtagttctacggaaggtaatacgcagcgtcaattacaaccactgatatcgcatccattgtatatcaaaaggctgaattgagtttggtttccatgtcggatcggagcaaaatagtcctgagccatattgtagtgtttcggtgcgatgatggcagggatgcacctgtgccctttccgcgtttgagactcgaggttttaggtctgtatagaccgagagatctactggccgcaactcggacctggaatttggaaatgtattatcatgtccgacggttggtgcatatataagtgcgtccgttctgatttttgatattaaacatccgtgtcttttggtgcaatggcatgcatgcctattactacttggttcgctgagtgaccaactccggaccaaaaacatcatcatcctgacggacagcctgcccttgttctaatttccgctttttcgctaggcgttctgtttcgctctcggagttgactattccagtgtcactttgaacagcggaagatggctgggttgattcccgtttagttgcagccaggttcactttctcggggttctggcaatgatatagtttctttgcgatgcgcttgaggctcttcatttgcgcggggtcggaggagagaggcgtgtaggattggagtagagcagagcactcagtcaagacgtgatgcagcttgaagcggatttcgtatagagggttcaccaggccattttcgtctgtttcgggggcagggattgtggctgtaactggaccaccgagtttgacatccagcaaaaactctgctaggggacgatctgccagtaaaaaggcagagaaccatatctgggatggtgtgtacaagaagtaggcgtccgtcatctgcgcagcggatttcagcagctcacgagttgtgccgtgggctcgagcgattcgatctgacattgaagatgatgggacgggaggaggtgcgatggacagcaatccttgctggaggtcttctgcggtctcatatggtagatggggggccggttgtccttggccttccgcgatggcttgtagttccatgacgccgccttccagtcctcgaaacggatgccgtacatcaaaggtgaaacgcagtccctgcataagcaagaattccggtgcgatgacgtcctctgtctttgtgtcaccaggaattccatctgcaaattgtcgaagagatatatagtaattatcggttttcgtcgcgacgaagagcgcacacgccatgatcgacttcggatggtatgtcatcggtgaattggttaggtagaagcggcggaggtattggatcgcggtggcctgtatgcgtagaatgaaaaatgtcagcttcccaagcttatttgtacttatgaagagcgtaacgtacccggaccattgttgggattggtggcttatatgtctctcccagctctagcgtcttctcgcagtaataccgcacgagaacgagctcctcctccggtgtcaaacattctacatctttattcttcgtgtccgtgttgctttccggtagtggtgttcccgccgcggaggatgcggtcgactgatgagtctcgcgcgatctgtgcaaagcggcgcgcacgcgctcgctagcaacggcatttgtcgtagctctgagaaattgcagagatggctcggtgtatgaccacagacggtactgggacgaggcgcggtagatgtcatcttcaatcattgtgttagtgctctcgtcttgttagaagaatcaaagaaacctttcgaggtttattcttcggcggagataacggccggctggtttgaaatttcgagaagaaatagacgtaagttgaagggccgttttagatatgagaataagtatttgacgatcctcaaggagctcagcaattaatccacttggtttcatccgaggaggttcgaggcttatcgataagaccaaccctcacttcacctgagcagccctagagctctgtctaagggacgtcaaatcattatattgttttctagtcttttacttattttattggtttggatatcaattaaaagctatgtaacatatatttgacatgcataagccacccaatgcaatccgcccaatgcaattcattcatattccatatgtgctttctgcctcatttcatcccgagttcaccccagaaaccagaatatacatcactcaccgagaagtcgggcggcaatatcacccatacgaccttcttccaactcatagtcttgacctccccgtctttcgacaccgacatatcggaaagcagccacaacacgatcaacgtcgaagcccatgctggagaaacggtcgattaaattcttgttgtacccatcatatctatagataatagtcagcaggatacccaatgaatggtagaagaacggctcactttgcgagattatcttcgctagctgcttgccgagtgtcatctaggcttgatccgcttccattgtcagcactacgcacgggagctccagcatagaggactgcccagtcgcgtgcaacacgctcaaattccttgggtgacttgagaagcatattagccacttcagcatcttggggatctttgggctcgggagtgctgagcaaagactgcagtgaaagcagagcggacttgatagtcagaactggtgaccaagcactggaaagtgtgtcgaggcagattgcgccctacattgcctatcagatcccaaattcgctcatatctatattataagggcactgaccgtttgactgctgacatttggatgccacactttggtctcaaacttcatggtaggtggtcgaaaaggatagtccgttgggattttgatatcgatatcgtagatgccaccttcatatggggtacctggtggccctggaaacgacccccttaggtgagtgagatcgtccaggttgccaaatggctccgcctttatgtgagagtggacatcggcgtgaatgtccgcaatttcttttccaatgcgacgcatacgattgctagccatggcgattcgactcgtttcaaaaagaggtcaaacaggagatgttgaaataaaccactttgtgtgtaaattgtggagacaaatagacctatttccgtcttgccaaagactgcacaagagcgtggaagctgccgtggagaggaggacagagtggggctaatagtaggatagtgttaggaaggtttcagatcaagtagagagcctcacacatggggtatgaaatcctctagggaattgaaagcaataagataaacgaggatctcaccaaaggaggggaactatacagggaatcagtatgagtgatgagctcaaacactgtcacctgtcgcctgttatatgcaccttagatatacctgagatatatacctcgacagagaacacgagtcttaagtctcggttgtgtgaggtaaacctcagtatagagcctcggaggaatataaatttcttcgattgtcttcgagaatgtcggaggtacaaccttggaagccgataactaagacaggcgttaaggcaacaggtgtggatgacgcagtggcggcctgaggcgtaaatagtcacgtgtgggcctaacagcttccagctcgcccagcgtcctggcctccggcgataccaccacatctgcattgacaaaccatccctttcgactcgtctttcacatcattcaataccaaggctcgggatttacctttctttgattacatttgcaacttcacaccagggattctgatagtctccatctcggtggctgacaaacatggtgagtgttcctttgggaggttatctcgatttatattctaacattcaaaactagggtcaacaacagtctaatctgggcggcggccctggaggccctggaggcgatgacaaggataagaaggtatgtttccaactcatttccactgctacacccagcgctaagaccatatctcttttatcagaaggagaagcccaaatacgaacctcccccaccacctaccactcgtcttggaaagaagaagcgcaaggctgccggcccaagcactgcgtccaagctccccgatatctaccctacatcgcgatgcaagctacgataccttcgcatgcagcgtgttcacgaccacttgctgttagaagaagagtacgttgagaacatggaacgcatgcgcaaggccaaggctctggccacgcaagatcccgctagagggggtagtgacttggatgtgatggatcggaacgctgatgagcggagccgagtcgatgacatgcgaggcagcccgatgggcgtcggcaacttagaagagttgattgatgatgaccatgctattgtctcaagtgccaccggccctgaatactacgtctcgatcatgtctttcgtcgataaagatcttctcgagccgggtgccagtattctcctgcaccacaagtcagtgtctgtcgtcggtgtactgacggaggagtctgacccccttgtctcggtcatgaagttggacaaggcgccgacagagtcatacgctgatattggtggtctggagcagcaaatccaggaagttagagaatccgtggagctgcccttgctacaccccgagctttatgaagagatgggtatcaagcccccgaagggagtgattctttacggtgccccaggtaccggaaagacgctacttgctaaggctgttgccaaccagaccagcgcaaccttcctccgcattgttggcagtgagctgattcagaagtatctgggtgatggcccacgcctggttcgccagatcttctccgttgctgctgaccatgccccatcaatcgttttcattgacgagattgatgctatcggtacgaagcgatacgactcacaatccggcggtgagcgagaaatccagcgaaccatgctggagcttttgaaccagctggatggattcgatgatcgtggtgacgtgaaggtcattatggccaccaacaaaatcgaaacactggacccagctttgatccgacctggtcgtattgatcgtaagattctcttcgagaatccagaccgtaagtgataccctagtatctactgctgcgccagcttactaacaattcctagaaaacaccaagaagaagattttcactctgcacacatcgaagatgtctctcagtgatgacgttgatctcgaggaattcatcaaccagaaggatgatctctctggtgctgacatccgcgctatctgtaccgaagctggtttgatggccttgagagagcgccgaatgagggtgcagatggaagatttccgggctgctcgtgagcgtatcatgaagaccaagcaggacggtggtcctgtggagggtctatacttgtaagcgctggaaattatcttgagggtgtgccggagtgcttgcgctggagacctgtactcagctaggtccctcgtgtattgtaataatcgagtaacgaacggtctcaagggtctactgcccagcaatttccctaaatatattcataaacatacatcgaaagtgcataatttgtccgttgtagttagtaatccaggttgtttgcgccaagcttatcagcgagttgcaaacactgcaaacaagctcattatcaggtcgaagcgcctctccccattgtcgcaaagtttctcacacaatcaaccatggatgaattcgacgaggaagcattcaacaagttctttccctcaagctttgggaagcaggcgaaatcggttgatgttgagtcccagatcgaccgctccaagcgtgttgatgttgcggctccgaaaccagaggacaatgaactaagcattgcccctagctcagaagcaagagggagcgacgatgagcaaaaacacagtgatgataatagcgacgaagactctgacgattcagatgatgacgaggatgaatttcccgtatcgcatgagcttgttctcaaggctcatgagcgtgccgtgaccactatgaccgtggacccctcgggggcccgactaatcacaggttctaccgattgcacactgaaactatttgactttgcctcgatgaccccatccacactccgcgccttcaagtccgtcgatccttcagctaagaaagcgacggccgcccaggacacccacgccgtgcactacgccgcgttcaatccgctctctccaagttacgttctagctgtgactgccactgcgcagccacgcattctcagccgtgatggtgagatactcacagagtttgtgaagggagatatgtatctacgagatttgcaccataccaaaggacatgtgtctgaggttacttgtggtgcatggaacccatctgatcctaacatatgcgccactgctggaaccgacagcacaattcgcatctgggatgccaatgttggccgctcgcagaaggaggtgatcgtgcacaagtcgcgggcagctggctccgctggtcggactaagatgactgccatcgcatggggctccccgaaacaaggaggggccgacattctggtaggtgcaggtcttgacggaagcctcgctatgtggagtggaaatggcccatacaccagacccagcgcagaaattcgggatgctcatgtcaaagatacatggacaagcggtcttgatatcagttccgatggaaggcttgttatcaccagaggtggtgatgatactatcaagctttgggataccagaaagttcaagactccagtcacaaccgtcacacatacctcgacatctttccgctacccgacatccaacattcagttctctccttcgtctgccaatatcatcacaggttctgaaaccggccatctgcatatcctcaaccccgctactctcaaggcagagctcgtgactcctgtgacaccgggatcgcctttgattactgttctatggcacgaaaagctcaaccagattatgacaggctctgccaatgccgaaacccacgtcctctataacccgagcatgtccacgaaaggcgcagcgatagtcatgtccaaggcaccgaaacttcgccatgttgatgaaattgctatgcccgcggacttgaatcagggattagcaggtgattcggtggtcgtcggctccaatggagttccgcattacagctcggcgactaggtctgctcgtcatcctacagttggctttacagcctctggtcgctctcgcgatcctcgacgaccgcatttgccgatgcagacaccatttgccaaaaataccccagatgagaagcacatcctcgagcatattccactcagctccatgcgagacgaggatccacgtgaagcactcttgaaatatgccgaccaggcggagaaggagcctatattcaccaaagcatacaaagaaacacaaccaaaggcgatctatgcggaactcagtgatggtgaagatcaaggaccggaaaagaagaaagcaaagcgatgatctgcgatgatctgcttggatatgtactatattcaccacgacttttggtatcggaagcgtcccgttgagtcgcgatggctcaaattaagctacctatgcaatatacaaatatctagtacagcttgtagtttcatatgaatcccaatctaagcacctaactccttacattcgggttgtcccctcttttgctgctctatgacgtcccccaagagcccgacaatccccaaccgcccgcccgaactgccaatgatatttgacctcgccttcgacgttatttcaattcgtatctgcgctgcggaacgctaaatcaccgcgtctcaaatgacatcttccaagttggaagccttggaaacggccccagcctccggagggcccgggggtttgtttagtgctgacatatcaattatctccgcggcgggcctccgctgttagattaccgcctaaccaaacctcttcatactcattactagtacccttgtccgccgtgataatcttcgcgcgagaaagccggattacccggaacagaatgccgtcttttgcgacttgacttgagatcaaatgctcaccgtcgaatcttggggttcgttttgatcggccgtacccaccgaagagctgaggtgtaaggggtgcttaacaaaggcttccccgccaaagcgtgcgataaacagtactcgagtactaggatcgcatcatttcatcagaacggatggcatcttaccagtcgtcgctggtagcaagcctgctacctggtcttctttcttcggctgtctccccgtcaagttcatccacattcgcgacttcttcttcccatcaccttttcgttgcgccatcaaattccacatcagaaactcctcatgaccacgatggaaataatgggggaggcatgcatgaatggtcatcgctgattggtattatcacggcgttatgcggcaatgttttgatttcattagctctcaatatccaacgctacgcgcacattcggatcgcaagagaatgggaacaggataagaatcgcaacgggaatttcggaaacaacgggacgcccctcgggtcgagggggaggtcccagaatcaatatcgagactctgagcagaatgatttcgaaccttatcgtgacgatgatggcgacgacaccgagggcacaaacattggtacgatttctcgaaccactagcaccggaagcaaggatggcgcagacggtcgcaaatcctacctcaagtctccgtactggtgggttggaatcgtgctcatggttgtgggggaaatgggtaatttcatggcctacggctttgcaccagcgtcgattgtctcgccattaggagttgtggccttgatatctaattgcattattgcgccatgcttgctaaaggagcaatttcgcaagcgagatctctggggcgtgctcgtctctattgctggtgccgtcgttgtggttctcagtgctaaatcgtccgaagaacaaattggacctcatgaaatttgggtgaacatcaccagatgggagttcctgctctatctagcattgaccacatcgttgattatcggcctcatgtgggcaagtcacaagtatggctcgcgatcgattcttatcgacgttggactcgttgcattatttggtacgtttctatttagttatttttacttttgggattcatttcttgttggtcttgttgctgactttgtaaaaaaggcggatacacggctctttcgacgaagggtgtctcttcgcttctgtctggcacattgtggcatgttatcacattccctattacctatctgcttgtcttcgtccttgtatttagtgctttgatgcaagtccgttacatcaatcgtgccctgcaacgcttcgattccacccaggtgattccgacgcagtttgttctcttcactctcgctgtcatcgtcggaagtgcggtcctttaccgtgattttgagtcgatgacggccgagcgcggaactaaatttgttggtggatgtctgttgactttcctcggggtttacttcatcacgagcggcagagtccgcgctgacgatgagtcgtcattttcatcagacgaggaggggtccattggtttactcaatggtgagaggtatcatgacagaattgagttgtctccacctgcccatcagccgaagacatcacacgtttccacagaagcacaatatgacgttccacagtccccaaggggctccatattgagccaaggcactgccgaagacgatgatcagtctacacctagaggtgttctttctgccgcgccctcttcgcctcatggatctttaactggtgcatctcctctgtctgctccatcgtttgacttcacttcaccattgcggcccccctctcgcatgtctaacccatgggcagatatccgccctgttactcctcccgggcatgaagacgaggcaatgcaatcctcaacagttcttctgcgtttccctcctgcacctggccccgaagaagcaacaggagccaatggaaatgtcggtgccgtacgacgtgcttcaacacccccgcttttaaatcaggccaaccaatctatccacaatgaggctccccctgaaacaacatcgcggcgcgctttgcgcaactctatctctcatcgtttctctcctggacctctgcttcccgcactttccggtggcttcagcgcggtggtcgctgattctatccgtcgtggtgacggtagtcctctcaaggatcggccaaggcggagattaggacgtcggcgccaactcgatggcgcttttgcagatacatcccttgagggtcatggggatgcggcgctttcacttgcaactgctcgactccagtccgccaccctagcggacagacctgcggagactggagatctcgcgacggaaataaataacataccaacacaacacatcaaggaggatgtgacccatcttcgcagcctgagtgactcgtggaatggggggcttgcgtggctgggtggtgctctccgcaaaccccagaaaacccaaagagccgacagtgttgctgtcactggaactccaacaccagagaatgagacacaatccgaaccacactacaacatcggcgaccatgacgccgaggcttcctagctctgaggcataagaacagttcattagagtggccatctcactcgaactctgtatacatttgctcttttccctcgatatctctccccttggcgcttttcccgataggtttctatcggcatattcttgtaattaacattgcatactgcgggtatatgtttaagaatttatgtatttcttccttttcacgctgtatatttcatccgtgaaggaggcctcggccaccagttttacctttagcctctttatccgttcaatttatccatattgatcacctgccacacatcttgttccggaagtatctatcggagaaaacgggcatcccaataggtaaaaaggttgacagcacgtaccactgcccagaaggcgcagccagctaccccagacctccacttctcgagtcaatttagccggacagccgacagtccttcccctcaaccccggaatgccatgccaatgtggagtaggggattgctccgtctcctgatagtactagctcggatcaaacgactctaagcaaggcactactgcagctgttcagactagcttgatcgtttctagggttgaagacggcttcatttccgatgcacaatggtacgagctacctgcctttttctatctacttcaattcgtgggatcattaaatcatgtcatacaattcgattaacctctctccgcagttcaagggtgtcgattgcgggtctgcatggacttatatgcaagagcttccccaggaatttatttttcttccttccaatcccatgctagtcaatctacaacagttgacgattgaatttggaaaataaggggttgtcttctcgaaatggtggccaatctgctttccaatgggctgctgctcgtgcagatctttgctgccctagctgtgggaagacagagcctcagccctctctacaaggattccaatgctccagtggaaaagagagtacaggacctgttgagccggatgaccatcgaggataagcggtcccagttgattcagggtatggtttcatctcaatcgctgccatagggaagttataattgctgatgcatttttgtacaggtgatattacgaattggatgaaccagacctcgggagaattcaactacaccggcctggttgccaacatggagctgaaggcaggcatgttctatggtatgaactcctctactcagctatttgatcccttttttatcggcccgcagaaaccaacagtaatgccttacagtcggataccctgttgcttgggattggatctcagacaatatcaagagggcccaggactacctcatccacaacactactctgggaatccccgcaattgttcagactgagggtatgtactccaaggatacattctccagctgcaatgaattcaagctcatacatttcttgcattaggtatccacggattcttgattggtaatgccactattttcaattcgcccattgcatatggatgctcgtggaacacagatgtaagcgggtactatacttgcactgtcatacatactgtcatcgagatctaacacggtgttgtgtagcttgtcgagagaatggcagaaatcattgcacaagaagccaaagcacttggtgttaatcagctctttgcccctgttgttgatctcgctcgtgaacttcgatatggtcgggtgggattcatctacatgttgatacatccatgacgactaagctaacaaagagaaaaggtagaggaaacctttaccgaagaccctttcctcgccggcgaatatggttatagctacgtcaagggagtgcagggcaagaatgtgtcagccatggtcaagcactttgcaggcttcagtgcccccgagcagggactcaatactggcccagttcacggtggtgaaagagagttgcgcacaacgtatgtcgacccccaagctcagagaataaacagttgactaagtattgcataggtggttgccttctttcaagcgagctattgtcgatgccggtgcttggtccatcatggctgcgtaccactcgtaagtctaacctgatctgatgatataccgccatgctaacatatgtttccagatgggacggaattccagcggtctctgactaccacactctcaccgagatcctaagggaagaatggggatatgaatatttcgtcatgagcgacgctggtggaagtgacagagtgtgctcctacttcaagctttgtgagagcgatcccattgacatggcagcggttaccacacagctgctgaatgctggaaccgacattgagatgggaggcggttcattgtgagagctttaatgaaacaagcacgacccagaaacatacactaactaccgactagcaacttccaaaagattcccgagcttgtcaagtctggcaagctcgatattgacgttgtggatactgctgtggccaggttgctccgggtcaagttcgaaatgggtctcttcgagcacccataccctgctgcgcctaggaacgagtggcgttcgctcattaacagccccgaggctgtgcaagtcgcaagagacctggacaaggaatctatcgttctgcttgagaaccacgaagacattctgcctctgaagaagtcgagtaacattgcggttattgggcctatggccggtggtctcatgaacgtaagtcacattcttattccacttttagcctagatattaatgacgtttatagtacggtgactacgttgtctacaggagccaataccggggtgtcactcccctcgaagggatcaaggctgcagttgacgacaacgcccaggtccactatgtgcagggatgcgatcgagcgagcaatgatcaatcaggctttgaagaggcaattgaggccgcaaaaaagtccgacgtggccgtcgtgattgttggaacctggtctcgcgatcagggggaactctggacaggactgaacgcaacgtgagtaaacccaccttgtttcaatatatatctgaaagtgtcagtactgacagacaaaaagaactggcgagcacgttgacgaagacgatctgtcccttgttggcgcccaaggacctctgattaaagccattgccgacaccggcgtgccaacaatcgtcgtcctgtcaagcggcaagcccattacagacacatggatcgcaaactcaaccgctgccctcgtgcaacatttctatccatccgagcaggggggtaacgccctcgccgacgtcctttttggcgactacaacccatccggcaagctatctgttagctttccccgctacgtgggcgatctcccgatattctacgactacctcaactctgggcgctccatgggcgacgtaggccataagtatgaaaatggaactctcgtgttcggccactcatacgttctcggtgacgcttcaccgtggtaccccttcggctatggcaagagttactccgccttcaagtacggagctgtcaaggtcgacaagagcaagatctctacgtctgagaagactgtcactgtgagcgttgatgtgactaatacccatgctacccgtgagggtacggaggttgtgcaggcctatatccaggatgatattgcctcggttgttgttcctaatcgtcagcttaagggcttcaagaaggtggttatccctgctggaaagactaagactgttgagattcctattaaggttgatgatatcggcctttggaatacttggatgaagtatgttgttgagcccggtcagttcactgtccttgtgggtagcagctccgaggatattcgtggtaatgctacgtttattgttcgtgatcgttgagcttgatatcgaagggaggcatagttcttaggacgtagtccgatgtgtgtgttgtttggtgcatcttagattgtatatatcttgcgtgatgtgtgaagatgagagattcgaattttcagaaacccagtcgctttccctacatcattttctcctcgtatcctaagctgattttacttctcgacgactagatacactagaatttactatgcactgtgatacatatctaacattatttatctcgcctggatgattctaccgggctggtatgagatgataatcagtatttgccgtactaccgatcgagatacgtgataatcaattggattcgaagcttcataaatggtgtaatggggatatctcataaaggcatagcataaaggaccaaacgccgtttctaaccaccgataattgatgttgcgagactatgctgggtcacctgcagcacgagaccctgcttgaccagtggagggacctcgaccaggatctggggagaccaaaggttccgatggcttgctggcaccactcgcaggtggattgctttgattgtcaccggagcgaccctctgctctccgagttttagcaccctctttcaatttctcccagcggtctcggtatcgcccaagaacattcttgagtttgtcgttttcgtgagcaacactttcaagtttattctcactacgtcggatctgctcctcgagttctttgatccgcgcgtcagtatcagccgcacccggcggcgcagtcagcatagcaacaggagatgcagtggccgtagaaggctgcaaataatcaggcgtcccggcgctctggcggtgcatcattcggattgattgctgcagcgccattgacgaagattgcgcgctcacctcccacatatgcaaccgtgtcgcaagcgaatcggtcaaacctctcaacgtctcattctccacctgcatctcctccattgtcttgtgtgtctgcggagtggtaagcttatcgggtgcgccgcggcgtcccgcccatatgcgtgaaccactggcactatgacgcatttcaggagacgagggggtctctcgcgcatccacaaagtcgtcatcgccatcctcaagactgttcctgcgtgcctgcttttcagctcgggtgaggattcctgcgtaggaaatagttccacccgtggttgggactacatagaatgactctgctgggttgccgggacctgccccagagccgtcccgaatcgaccgcaatgcggctcgagagaagagcttgttcacgtcaggctcgcccgcagtcatggaccggtctagaacagcatgctcacggtctagtttcaccccagctgaggccttgcgactctgttcagcgcgagctggatcagaccctatttgaatacccgcgaatgccaaaggtccggacaccttggagaccagtcccccgaaggctgagtagaagcggttgaatgcttcatcggcaattgcaggcttatctttcgatccttcagcttcagctgcactaggtacggtttgctgggaatccacctcagtgggactgggtgtcggaggagaccatggttgtctgggtgtagaaaaacgactgtgccgattcttggctggtctgtcacgtagccttgtatcgccggctctagccctcggtggtgtttcggtcatctttgccgcggcatgttgcgatgtaagtgttggcgataccggcgatccacgccggggctgtgatgggattccccgggcggatgctaggttactagcaatagatggtgtatcccgacttggcagacgagtgttgcctaccaatcttggtggtaggtgtgcatcctggttcgcgcttgcactctttgtgccgccagtctcggcggtcggttggatcgctaatgccgaggagccagtagcaggtactgtttccgcagggatcgtggttgggtgttcatgttggaatcggaggatttcggcgagcttcttgtggtgagtttcgagtaaacgtagggtccgtagggcctatgacgcgttagcccagaaccgagcgggggtagatcttcaactcaatcaagactcacctcatggtcggagctgctctgtgcagccgttgcgaattcaccagcagctagatcatgctcctcgctggcagcgactgggttggccttgcgagtctctagcactgcgttccgggcatgagtgtgggcctgagtgcggtcagattatgctgaaaatgaggggatgaggtcttaccaaggccaaaggagctacttccatggtgaatatgatttcactaggagtcaagagataaaaaccaggtgcattcttctgatgggatttttccggggaatgttggagaagtgacgttatgcgcagtgaatgggagtttgatttgacagtgacactacggagtaggtaacaccatgtacgccatatacagatacatgaggtggacgagaggacattcaaaacaaaacaatacttctagatcaacctaaaataaatattctacatttcagactgaaagcagccaaatgtcaagtcacatccacattccagtggagacgcggagagtagacgctgatagctacacggcggtcaagctactcgacggccatcgactcagggggaatgccaggaagaccaagaatagcaggaataatagagaatagagtcatatcatcacgaatgacatacataaaaccaattgaataggagaaaaagcaagtttcagtctcataaggctagtcagttatctacttggcgggtgactaagttgcggagctccaggggatgagcggacgattcagcacttctctctctctctttacttcgatcccgtttatatatggaagttctcgcacatgaaaagaagagaggcagaaagtgttactacatacgcctcatgacaactttcccttgaatctcctggtctccccgcatcaacccccccgattctcattccctctgcattcctccaattatggccgactcttcatcttcaagctttaaaggcgagaacagatcgcgccgctcctggacattatcggcagaatcaagtgcaatcggtagcaacggtcggtcatcccaggagtcgaccctcgagagaccgaaaacccagggtggagaagcagcagatcctaaggctggtcctagtggattctcaaagctactcgatgcgcgtcggaggcggaaagagcataaaaaaaagcagcagaaacaagccgacgagccgccggtgccgactgttgttttggaacaagacctgcatgaaagccggtccaatgaatctcgcgatgggacctccgcagccccgtcgtcgagcacagacagctgggtgccggagaacgagggcaataatctattgacagatgattccgagccggacgggtaagttgaacaaatggccttctcattgtcttggactactcctaaccagctgatctttttggcttcgtttaggcccccgccgctcacctcacatgactcccataccggattctacacctcgtcctccccaatgatcaagacaaaatcggtggataccgcaaatacggaaggatggcatggtgatgccgagtcagctgttagcggctctagtgccaccgggtcagaatcaaacccgggtgatagaatctcccgacgcgcaacatcgggtatggcattggatgtccctacggactcaaatggcaagaaacgcagtccatcccctgggcgacgcctgagaggcgcttccaattcagacaaaaagggtgccagtgacgacgctgaggcttcatcaattaagtctgggagcaacaaaagccgaagtctgttcggaggcagcaggcggggcagtctttcatcaaaacgagcacaggcagcccctgacgacgttccgcctttgcctgcgccaattcgtactgatctaacggaggagaagcctcgtgcgcttgaagcgagccccatgccgaacaccccacctcataccgctattcctgcaccagagacgactgtaacccctccaacaccaactgagcatcgccctctcagtgcacaaatcctatctaacaatgttaccgattcgcccgagcccctacaagaaaattctcccggtgttactatcgtgagcccctctggaaacatgatctctcaccgccgggtgcggtccgcttctgcagctcatggcccaagcaaattgtccaattcagtgtctgcactgacacctcttgaagaaaaaaccccgggggcgaagaatgcaacttcaaaccagcaaagtggcttcttctcctccgtgttttcagttgcgcaaaacgccgccacttccttaagcaacagcatcaacgcacaacagagaaatcgtccaacatttcaacctgttcctgctgatgctgataaatcactcaatgaatccacctcggaggagggcgaaaggacatcggataacggcaagactgaagggagaccatctgctgtagagactcttggggcaggagatctgaacttcagccatctggacattgacgcacgacccggtgagtcaatcacgactgccgacggcgtggtgattacaaagccagtgaaccccgctgacaaccgcaaaaacacagctgtttcccggcgagatgaggaagcggctaaacttgaagacaaacgcgcagcgcgcgctgttcaagtagcatacgaaagaccctcggagctttcattgacgggccctgcggaagacgccctggagattgagtctaacacctcacttccgaaagatagcttaattctgggtgatcaaactcctcccagtggtagtattattgacggtgacctaagcgggggccttgggcgctcaggcagtgtgcgcagtaggcttgcccggcgtcatcggggctcatctggggccacagcctcgacgattggagcgattggcgccaaccccgctgcccttggtgttcccggtatcaattccagtgtgcctcggttgactggcttcgctgttgcgagtaagaagcgcaatcgggactttcaccaattattccggagtgtacctgaagacgattatcttatcgaagattacagctgtgcgttgcaacgtgagatcattcttgccggccgcatttatatttcagaagggcacatctgtttctctagtaacatcctgggatgggtcacgactctagtgatcagcttcgatgaggttgttgctatcgaaaaggaaaacacggccatggtgttccccaatgctattgccattcagacacttcatgcgcgtcacacgttccgcagtttgctcagtcgcgagtccacctatgacctaatggttaatatttggaagatcaaccatcccaccattaagagctctgtgaacggaacccgcgtaacccatggcaccggtgataagacagagaaggtcggggaggacgagagcgagtccgagagcgaggccaccgatgaagatgaaatatacgacgaggacgaggaaggagagaatgccgagagcttctacgagggtggcgacagcgccaacaacagtgcaacatcattgccattgcaaaaaggattaagtcgtaaggcttcgaatctatccacacatgctgccgtgccagtggccggcacaaatggcaatggcgataaaaagaacggagacaagggaacttccaaggacgcgactcctgatttcccaggtccgactacacatgcgcctaccgagtacgtcgaagccaacggacagtacgaaaaagtcatcaaagatgaaataattcctgcgccgctcggcaaagtcttctctttggtttttggcccagcgtcgggcgaatttatgaccaagttccttgccgacaatcagaaatgtggagagctacagttcgagggaacaccgaagggtttgacgatggaaagcccaaccaggaagtactcatacatcaaacctctcaatggctctatcggtccgaggcagaccaaatgtatcagcaccgagaccatagacttattggaccttgaaaaggccgttcttgtcaccctgagcacccaaacacccgatgtgcctagtgggaacgtatttgctaccatgaccaagtacctcttcacatgggctcctggcaaccaaactcgcttcctcatgacttgtactattgagtggtcaggcaagagttggcttaagggtcctattgagaaaggtgcaattgatgggcaaacgacctttggtaatgagctggtcaaagccttgcaggttggtgttgttccccgtgggcgtggcgctggacgaggcaaaggaaagcgcaagaagggcgatgccgcagggcgggagtcgaccgcagctgcttcgttgaaggttactgtggattccaacaccggaaatggggaatcatggggactattcgaaccagtccgcccactcctagagccctttaccagccttctcagtccgctatggactagcaacgtcgctcttctagttatcgcaatcttgttctacatggcgttcttccgatcctcgccgtcgtcgtccatgctttcgtctgatgtcggctttcccggtcacagcttgcctcagaggctggccgcatacgaggagatgtggcgacgcgaagagactgagctctggaattggctggaagaccgggttggcatggacggaatggtatttccaaacgtctaccggtcgcccgagccacacccaagtcgtaggtcatctggagctagtatactcgatgagcgcgagctcgctgcacggcttcgcgaagagaagatcactgaccgtgagatggaccatgccattcgcactacccgccaacatctcgacgtccttgagaagatggtggacaaacgcaaagcccaatgggaagccgatgaaccagtgaagtccgaattgtgatggacatcgatggttgttcctccttgcacataagcccaaccaggctcccccctatcctctctcctttataaacttgtctcttgccagaaaagtcccacaattttccttttccaacaccacacaaaatctatttccttgtctttacaacttgttttattctcatacatttatcggggtgttatcctggagtcgtggtaacaagcagagcttgtccatgctgatattcaccctcctcacattcattttgaacagtccaccgtcattatccgactctccctccccatatccttcgatacaggggcaggttttccttgcatgtacatgagcgccaactatcttgtctttaccggtccacgagctaccggcttctattttcttgttcttattgcttatttttcatctgagcgtactagctacttcttttttttttgtgtttcataggtggcactgtatccctaaaagtttcccatgcagcgtgtttttgctgtttggatatcttttggagtgctaccgtgtgctctcttttctttgcccattgggcttctctgtgaataccttgagctatcgctatgttatttacatattcaatttaggctatgcctgacagccttgtgtgcgttcgtactactagaaagtaaattacttgcttaagcttgagataagctcgaccatatgtccatatcacttaacaagagaggaatatcccgaatgactgcaatagcctggtttataaatatcaatcaaggtatctcgctaagaaatcttcgtttcaatccattttcttgagcacttggtttttttcatacttccctgttgactatgtcacccctttccccttccaatgtttccccttcacttctcactatttcattcttgcacctgagatattagtttccaattgatttacacgcgactctttgagcaactcccgagatgaaatcgatcagacacatcacgacgcgttcgttgactccattccgcggacaactcttcccgatgcctcctcgggaagctcttctaccccaaaacgaattggcctggctcccagaagagaggaagacggcacatgaactgatagagcacccattcctctagagaccgaagaagcctagcaattgatggagtttaggcagagaaatagtacttgatgggctcagatctacgtgcatgatactgactgatatatctcgggaatatattacgatagaggacagttggagaaacagcgcagtcttggatacatgatcaccgaaggaatctaaaatacttaatagatgtatcggaagctgttggaaatcgttagtattgttcttacaagagttggaatcgcatcaagagacatacttcaggttttctcggtccgtcaaatccagaaatgcagtcgcatccagatctctccccgcaagaccaccctccatttgggactggatgcgatcgcgcttttgattttcccagcgcagcaggagaccaaggatactgatcaaaacggcctcgatcaagtgcgagacaatcatggaccagataccgagcgtgtaggtaggtctgtagttcgagttagctccgtggttctaggaataatagaactatcctcgagggaagaacacacgattgatccgttttgtagaagaatggcccggcaatgtttccagtgcagtatcctaggaacagaacagcgttggtgacgactttcttagtatggcctaaattcataatagtattagattttgtgatgttttaatcaaactccgaaaacagatgtcacttaccagccgtgttggccatctgcatactcaaaacaagtacaaacgcagcattgtacggccctgtcaggtaatagcaaatcaagcggcccacactgtgttcgacaggaacaaagcgaagaccaaaggagccggcaaggttaggaatcaggaagatgaggacgaaaacgcatcgtcgattctgaaagcgatcgttgaggtagacgcatgtcaaaatcgagatagcaatgataaaaccgtatggaatctgtttgaaccaggttagctgaagattattttgttatcaaataaaccctacctgcataagggtggtcaccaatgttgagaacccaagccctttgataattatggtgccgaagttcgatataccaccgttaggaacattgcctatgttgatgttagtcgatgcaacgtatctggacatggcacaagtcacatacaaaccacgccaagaatgaagaacatatagagtttgtagtccaggaaagcctccaaaacctgatacggcttgagatgtttattttcgacaccagtctgattttctcgtaaacgctcaacagccatgcggcgttctctcttggtaagaccttttgctgtaacgggtgaatctgggaggaagatgaacatgacaataccccaggtagaacatagtgcaccactaagcaaggtcagcaaaaggacagtttgaatgagcgagagaattagcatacattacgagaaactcgtatttccaagacggcagtgcacctttaagatgaccaattccatagcctagtagcccacccaatgcaataccgaggccgttcgctgtgtaccacagtccaagacgcactggctgttcacgacgggtataccacatgctcgtgatcaacatgaaagccgggtcggagcaggcctcggcggcaccgccaagggctcggagaacagcgagggtctcgaagctgttacatgcagcttgaagcatgaggaagacaccccttgaagaggaatgttagtgtctagttgtattcgagatcagtttaacgaaccacatgaaaatattggcacccagatatttccctaaacacgtatcagatggctatccagtcaaattgccagggagaatcataccgattggaagacgctgcatcagaaaattggtcgggaatgcccatgccaggaaaccaaaatagaagatactgctcagccagctataccgagttccatgtagatcgagatcttcccgaattccaaaaatagcagcatagctcaacgttgtctatttccaaaacgcgtgctattagcacagtttttcggccaaaagggagaaaataggtaaatggtcttgaatcaaagagactgaccttatcaatgtagaagaacgcatagcaaacagccaagtagggcaggatcataaagtcaatcttccacaatagcttcctcgcctccacaggatcgacttcttcgtggagctcgtccgggtcatcgaacagcgccatagccgtgtcgccgtcagcattcttggcagccttaaaattggagtgatcttggttgctttcttcgtgcgtgatagtgggaacttcggcgatattggccttcgagtcaacatcttgggatggaacagggggatcatggttcgccataatggtgttacgttcgtatgatagaaagtgcgtataatataaaatagagagcagaaatcaatgagcctgggctagatggaaatatatataaaatgcaggaccagccgggggttgggacgacacgaaatgtataaagcgataacaataacctcggaatgaccccgagtctcgccccttgattcaagtcaaagctgggacgtcttcgaaaagcagccatttcgtacttccccgcgaattccagaccctaccttgccccaagcggcatagctctcaaggatcatctgcggggaagacccagtacggggcccccacgccgtcgtgtcgcgagctgatctgtcccaaacgtggggaaggtgggtcttggctgacgagtagagcagagtcaaatcgaaagcactgttcagtccatcttaacaagtctggctgaaggccaaagcttgcctggcacaaaggctgctaatgtggtcggcgaaagtccgaggactcggagatgatgccgctggactgatcatttctgaagttgtttacaccgactcatcgctgagcgataatgcaagctcctatggatggcgtccgagcttccatgacagccgaagatgacagttgtgaaagcgagtctcaacggctgaagctgtaaggagtatcatggttcaccgccgcaatgaagatgcttcacttatccatatcgagatgaatttgtaagcaaatagcaatgccccttgctagttagctgggtatgagaccgtatgacatatgattaagagttgagaatttccttctttatacgaagattccgattccggtgtctcaaattagatttcttcccacggaatccgactaagaagttatcgatagtaaaaagaagaaagatttgaattaaattatgagccacaaatcgcacttttgatgggaatgatcttctacgcaaagatactagacggttagtcaactttttgacggggattaccatggccatatgtggctgcagtgtctatcgccggttgaagttcaagaagcgagactgtatcagaaaaaacaatcagtatcacaattacaaatgtagaaccaagatatagaatatatccacttaccgccacgaacaagatgatcaggttggacccaataaacgccgcgaagatgcccagatcccgccatcggttgtcaaaggacatattaaaagccgcatagaactgctctccaaccttgtacgcacagtacttgcaagcctgcgccgcgtcgtcgacgatgtatccgttgccaccgcggtcgaagaatggcttcatgtactcgccacaagtgaggttgtcaggggcattgaacagattcagctccgactctgtgcaaactacatcccgtccctgtagctctgtcacgaccattccgccgatcagacgagtgaatggatctagatcgtacagccatgcacgccagaagcctggcatctgcggcttggggattgcaacaccacagaatagagagaagataatcactaccggtgggttgatctgagacgcaatgaagctgttgggggtcagggctgagatcatctgacccaaagtcacagagaacatctcggtgatgaggattatgaagaactggtagccggaccggctggactcggtctggaaccctgggatgtagtacaaggggaggaaaaagcagacggcgcacaagacgctgtatgggatttcggcgaccaccattgacagtgaaaaggcaaattggctgtaggtttttgatgctgactcgcggtagaagatcagacgcgccatatcgtaccggggttgaaccatttggagaataattgctggtagcaccgtaacgttgaatataacgaaaatgcggtattgcagcgaggaacgagagtcatcgagattcaagaatacaagacccgtgatgatagaaattacaacatgggtgtaaagcctggtgaagccatagttcttcgagcgccagaatgatagatgtgttcgccgaccgacgactttgatctggtgccagagaggtgaagcgtattctctatcgaccttcttctcgtcctgattatcccgcacggcctgcgcacgctcttgcttgatctgaatgatttcctctttgacttgatccagttcaggagaagtgcgccaaatgtcgccccagtcacggtctccgatccgacgtgtttggccagcgccgatggcatcaagcatccactcggccgggttagcatccgtggggcaatcggcaccattgcgacggaagtaatccagcagaatctgggagtcatggccgatatcaccgtggtagatgcattcacctcctctttggagtaggagcagacgatcaaagctttcgaatagggcggaattgggctggtggatggtgcagagaatagcctgtcctgctgctgctagcttccgaaggaaacgaacaatgttccaggcagattggccatccagaccagaggtaggctcgtccaaaaataaaagcagttcaggcttcgctgccagttcgacgccaattgtgactcgctttctttcttcgactgagagaccagtttcaggtgttccgatgattgcatctgccaggttctctagctccaagagagtgaggatttcttctacgtaagcgtacttttccgattggggggtctcgaatggctggcgcagatccgccgagaaacgtagtgcttctcgtaccgtctgcatgtcttcgtgaatgtcaagttgctctgcgtaagatgtacctctttggaacgaggtgcctggaggtttgccatcgacgaaaatatcaccagttaccacaccgatgttctttcttgcagccaaaacatccaacagcgttgtctttcctgcaccggatgctcccatgagtgccgtcaactttccaggctggacatagccgtagacagagttcagaagacgtcgggtacctgagggcacaggaacttcgtaagagaggtcttcccaggtgaacacggacttggaggtaatattgaggtttgatcctgcatcagactgaagagtctttgcttgtctgcttgctttcctctgcatcaaagcctcatttagctctttgcgctcggcgttctctttctggtagaaagtgatggtcttgccgcctgcaccgaattgcagtgtttctccaaaatataagtttgaaatgaggaaaccaacaatcagagcaatcatgatgccaaagtttcgccaaagatcaccattcagataactgaagctttgcgcgatgtagttggagcccgagatgattgctgacccagggtcgcctcccactagagtacaggcctggtgtgcaatgtcggtataaccagctccagctggcacgagtgagtctttggtacatgtcagagtaaggtgcctaaattcgttgaccatcaatgcagcgaatccgagaccaaaggggttgatgaagtaaatccatcgcagccacacctgagcgccagaccactgaataagatatccggacgtcaaaacgaagaatgtaataatgacggatgcaaacttgatggcataatcgaagtcaggacatagacatcccacggttcggaagaagactgtcatagtcacatagccctcaaggataatcaaaacaaatataaagaacgccccagcatcaagaaccagtccgcacatgaagtaaacgatgatactgaatacgaggatcctcgcgatggcaaatgcagtgtcaacgataatctgtgcaataaaaagtgcgcttggtcggtagaatgtgaatgaacggtgcttgttgacaattgagcggcccatcattgtggctgcaagttccgagaacgcctggaagccattgaacagcagactgatgaatagaagacctcctcgagtaaaagcaccggcactggtcttgggttgattgagccatacagtacccaatatgatggcaatgccaacagaggtaacccaggagacggtcaatgcaaacttgtcttgccatttaaggaggaactgccgttgcatcaaagcccaggtttgtaggtggaaaggaatcgagtatacagatgattcagaggtaaacttgcgctttgcctctttattagcaatctcgaaatcatcgtagattttcttttccttctgaatctgggcgcggtaggattccatttcttggtctagtctttcactgaagacggatttgtcaaaggcttcgaccagcgcttgtggtgtagatggcacatcgtcggcacttcttccatctttgaactccctctcgaaaggatcggtgcatcctgtcaagtagtcgggcgtggtttgacgaggcttttcgcggaagccgaggccttcgaaatatgatcgtgcttcggatgcaggaccgaagaatacttgacggccattgtcaatcaccaggaccttgtcaaactgtttatagatgttctcggacgcttggtagagtgacacgaaggttgttgctttgtatatgttggtcaaaattcgtagggacttggcgaaatcgagggcagtcgaggcatccagaccacgggtgctgttatcccaagccaatacagtcgcagaggtgatcatcatttctgcaatcgacacgcgacgccgctcacctattctaattagcgtcaattgcgatgaggctgcacacctaaaatggattgcttacctccagatacaccacggataaactggttgccaatcacggtgttggcagtgtgctcaatattgaacattttcagaagcagattggtcactttctctttgaactcagctttcgacacaccaaatgggcgctttccaggggtcttcgtgtcgagggcgaatccaagggtttgtttcacagtcaaggtgggttgatgaacatcatcctcttgattgtatacggcttctccgcggaatcttttggagaacgaatccgcgtcgaaaggaccatagagcacctccccatctaccccggtgtatccaaaccgctggttcgcgatcactttgaggaaagtcgtacagcctgatccgggacgcccaaggaccaagaccatctcaccaggccgtgtgagaccccggaaaccttccaatatgttgtactcctggcctttctttctccaaccgaagaggtcaattagtgttccgggtacattgagaaaatcgatgattgcatctgggaatgttttgatgtatgtcttgacgccgcccattccacgaactgacaggttattccagattacacctaggaagacagtcagtacttgtttatcctccctatgttgagtgtcttcggaccgatatgcttgtctttgatgccagcctcctcggaagcgacacgatcgccacggagagtggtctccaggtcccatgaatcatccgacgtagttgaaccctcatctttctcgatatcttcagtggtgactcccgtcttggatgctcgggattcttgtctagataatctgtgggctcggtgcgatatgctggagaattgtctgctcaaatcagaaaagtccttctcggcggtcataacatcgacacccgtctggatcgggatatcggccggggtgttggcgatgcgaatttcttccagctggcgtccatagctgtttgaatccaggatacctcattattcgccccccaaagcccaaacaaatgtgggggcaagcctccacggacggcatattccgcggtggagtgaccagatttgaagatgccaagcagacgggctcctaaacggggaaaagcgtgcaatcccagtcgatatgactcgtgatgagtcgtgatcactctgcagatgattacaaattcaatcatatcgtgcaggaaatctcgttctagagcaaacagcgaagagcacggatcgtttatcgacctactgttgtggagaagtaccaattagtgccctccactttacggggtataggcaaagacaacgtacaaagtacggagtacatatcattgaacatggatagaccctgcatagtacatctatgttccatatcgtgttgcgtatgatccgttcatagcggatacaaactcgcatatctccctatattgtactccgtatacatgcttatgcttggcaggaccatcaaagtttagacttccatttacttggacttaataactaaagcctcgaatactccgtagttgctagttagttatcttgcctctttgcaaaacaagaagacagtcgcaaatttattcctacgcgtcgcgccagcacccatctagttagctccgggatatctccgggtgaccgttagtttctcctgtctactccatagaaggccaacatttcaagaatctgacacgtttaaccttagataacccactttgctcatttataggcgaaacacaatccatgtctttattgggtagcatccacgtgcaggagatgcgccgccttgcatattcggagtttcgcgaccaatcaatgttcttgatgtttccgcaaaattacccgcagacatctcataaactggatttccaacggttcgagattttcctaatttgttgccgcttgaagtcctgttcactaagcgcatagcctaaaactaaaagaaaggccgaaagcaatcacgtgataggtggatactgattactaattatcaatctatttctcccgtgatccatggatccgtggagactagcgctagtgactaaaactttatttgttttgaacctatgtcgtaccctgtacagagtacaacagagtacaccttctcatacttgctcaagcgtagatcatggtatggcaacgggcgacaactccggcgccgatcaataaattcgccatccaaaactgcgggtccccgagatcgaccttaactccggccatccaccatgttcttggcaatctgcatcgccaccagagaccatatgtacagtacatactcatgcgcatcgcattgcgtgattgatttgagagatagaaaacaattcccttgaagccttgtccatggccctgggaattatcagcgtcatctgcagcagtctgcttatgaaaacttggccgcctgatatcagtatgaaaatgtagatgtttgaatgtgcgtgtgtatgaagaggttcaatcttccagttagactctaggtataccctatgaagatcgatcttgtaggtagagcattaaagaggaaagaggatccactcttgatgatcgaagcgaccttctacacagagtgattctcgcgaagtagatcattcaatggcctttacatacaatgttgtacaccataatctgctgaacaaaatccgcgccctattggtattgattccatcatagtagtaaaggggagggaaaaaatagcattcttcatcccgatcccgagaccatcgcccatcaatggcagctgtgatgccccttgccatcgacctttgcccactgattcatttgctcccaagccgacaaaccgacacagatcgcaatccgccataccattctacgactgagtccctcgcgccacacaccccagataagggtcagaatagaaaccgccagaaaagcatttcgcagtttctcgacgccagcagtggccaccgaacccgcaaagagaaaatcgaggacagcctagaaacttagtatatgcattcaataccatagtgacatgggaaatgacatactggtagccaacaacacgaagatgaaagcaatgcggagccttccggtagatatttaacgattaactgaaaaggtcttcgcagaagggagccgtcatggtctgggctagacttgcacgtggaattttcggagggtttttctgtggagcaatcgctgcatgacattttgaatatatatagaaaaaatggtctgggagaaaatgaaaccaggttatgaagctagactgtgatttgtatatatattgtcgcgggattttcgcgtcgtcggagaatgccccacagcccctggctttaccatactgcaaacaagtcaaaatacacctaattgggatgagcgctcggttggtaattcgtatttcttggcggttatacagattataaacgtgaggagtcagcccatactatatgtacaacagtgagtgtggttcccaagctttgtcctagaattctggtcttttgctctagcgcagcggaaggtggcacgtgacaataaagtcatctttcttctttatctgggtcctccgggagtaggtgctttctaagcgaatccaaagggcttgttaagtgcttcgctaaccacgtattagaatgccctactaaccggggcacctgccattacctgaagtatttcgacgtttctaggctcaagaagcataaggagcgggttgatcggcttgagaagtaggaagggagtttaactactagttttgacgtaaatacaattccccgggtattagttgacacggtgagcgggcccttattgaaccgtcattttgccagctggccgcttttaccgccttctttaccttactacacctccttagcaagaccatcgacccttcacacttgacgtttcaccatgacgacctcaaaaacacccgactcgtttcaagcgcacaaggccaggaagcgccttgatcaattttccaccgacttggaaacggccataaaccatgcgacaaaattcaaaccttatcgaaagacagctgtaatcgcctttcactgggagaatgatgatataggggtcgagcctcgagagagagaactcctagacgtcttcaaatctgtttatggatttgagaccgagagtttcacgattccgcttatcgagtcccagttcaaacttctagaacgtcttgtttcctggtcacgacgaagttctggagaagatacgctccggatttttgtttactcagggcatgcggggtttgctggaacagtggccagtcgctgggacttggcgtgagttataccctatctttaattctactaatgtatcccagctaacaaataatagcggcaaatgcgatcagtataccggtaacctgcaaggtcctaacctcaactggtgggaaattcgtggctacctcgaacaatacacgggcgaagtttgttatctttttgattgttgctccggaggatcaggggccttaagcgcgtaccacggcgcagagtttatagcagcctctacctgggatcagacagcagtgttgaatgtccatttctccttcacccgaattctcatcgacgagctccatcagttaaacggtcaggctgagacgctggctagtatctatgcccgaattttccgctacacacagcagaatcagattggggctgcaccaatccatatccctaaaccgaattcgccaagcgtgactatcggttgtaatcgctcaaggccggtcacaagaagcgtcgaccgagagtcttacagggtgctacttagcatcaaagtccgggaagagattcccctagatttcacccaatggaaagaatggcttactcgcaatattcctgctaacgttttgtccactaatgtcactgtcgaaggagcatttcgaggctctagtctccttcttttcacggttcctatcgagatctggactatgatgccggctgatgacccatcctacacatttattggacacgttacgtctcataatctcctgtcccaacgaccgactcaaacaagcacactaacaagcacactaccaatgcactctggcgctccatctggaagagaaaaccagccaccgcgaagccccaacagaaagccgttcggtagtcctaagcgttgaccatctcgttgaacaggcttggattgtgatttgccattccctccccccccctttgctttgtcttgacttgcttttccttattttcgaacctggataatgagttctactctactcaaaatggaatttttctttcttataattcttcttgaaaaggatccttcccaagcgagctgcgcagcgcagaacatatagtaaaatcgataaattataacatggtattttaacaaccaacgctttcattactgtccgatagcaattgataagcatttatagtatcatatatcagttttgaagaaatcgaaaacttgcattgttatggtatcgaaaaatacatcgctgaaccctagaaatatatatttctcagtcactactcattaatcactttattgaatccctccaaatcctcataagtggatggatgtgctccactccgaggttttcaatggctactagtaaacctggacaaagcgcagagcgtctatgccaaaaccgccttaatctgtgcctcaagtttcttcatgtcaccgccaacaacgcgattcacctccttgccgtccttgaaaatgacaaaggtgggcatagcgttcacgctcagttcccgcgcaacaccttgcagcttgtccacatccacctggataaaacgaacgttttcgtactgctcgctcagtttgccgacaacgggagcgacggccttgcagggtccacaccaggttgcgaagaagtcaacgacgacggggccggaggaagtgagggctttgaagatgacttggctggacggagattaggatggaataaattgcgagcagaatcaagagttacttacttgtcgatctcggtgacctttccgtgagacatgatggcggctgggctcgatttgcgtgacttaaagaagagacggacagcttgtgaggggttagtgtttggttgtttgtttctgttggaagtggtcgaaagctattggtggacgaaggtttggatcataggagatagtgcgtggcagtacttaccaatgtatatcgcagtgaggattagaacggtcttgagctccatcttcagatgtcggcggttctcaaggtctttggtggagcgtcgtgctatttagcgcagcacgtgacctgaaactatgccctatctagaggtacgtgatcacgacatttgaggggcaatgatgaggtctcaagtaccttgggggcatataagtgtcttactccgatcatgccaaatctgggcattggaaacttggcgagtttaatataacggcagccaccaataagcctcgctatctaccggacaaatagcgtgtgatgcgcttgctttttcacgtactattttcgaaggtctagaagcaaagctatgtacttgatacattccctttaaagctaattggtataaaatcttgctatatgtaatatctcgtcgacaaagacaagggtaatgaatatcaaaaagaagcggacccgggccagcataccagactatcttgattgcaggtttcgccacggtaatgcatccctatagtatccctcacgggccgagccataaagagctttgttatttcgcattttcgggggcgtgatccgttcttcattcttgcgaacaagaatagtcggccgcttatacgtctttttgggagtcttttatagctatttccacattatttgttatagctagaatgctagctgtgaaaacgactcaaaggaacaagacaaatttcccatgcacaagctttgataaggccttcggttgagtggaaggcaaattctcaaaatattacccgactttataaaaactcttgcatgatgcttaatatgtaggagcaacattagtttcggtacaggataaatctaattattattaagctcaagaagagtcgatgatccttgatcagcctcccaacgcgaggatcttgaactttggaatgttttcggtctgtaaattctccgactggcttagattgctgtagtttatgttatctcttcgttttttatcaggccttcgggctgtgaactagcaagcccccaatcaaaaaacatgtctcacattctttctaaaagctgtatatgtatgtttcggctctggaatgtagcataggagcgaaggtttcatatatactccggagtccgccgtcggtccatatattcatcgtgaatagccacaaactgaaggagcaagcaataacccccttctatacactcaaacctacttggcatggatttgcgacacgaaattccgaaaatagagcctgggttgagctctaatgacacactcaccgattccattacccgaaacattaccacaaaaaatgctccaagcacgaccggatcgatgctgcgtctttcattatgggtctcgtttgccgcatggatctcgaacttcgacaacggctacgccggtacggtgctgatcatgccgtcctacaaacacgcctttggaagctgcgtgcaagttatagacccgaatacgtatgccgaaattcgacattgctcattgacgccactacaacaatctcttatcagcctcaacttcttgttcgttgccattggaggtgcgattgcgggcatgaccggccgatacttcgggcgcagggggtcaatccaagctggatgtacattggctattatcggtgctgctggaatgcttggcaccagcggaagcttcttgcgctacatggtgtgcagatcgatcagtgctgtgggagttggacagttgattgtatccagcgtcacttatggttctgagtgcattgtcgccaacaagcgcggcctgtccttagggttgtataatgttggacttgccggaggaaatcttgctgcttccgcggtgtgtgcaggttctgctcgtctagaggcaaccaatgactggcagtggaagacacccattttatgccaaatacccttgggggttattctcggcgctgggattttgatgcttcccgagtcgccgcgctggcttatgatacacggtcgagaggaggaggcacgcagctcattcggcgtgctatactgccaaagtccatattcgccggaaatcaccatgcagattgatgatataagaaccaaccttgcaatcgagcgtgcaagcctcaaatctgtctcatgctttgatatctatcgcaggaagcatatcagccgtaccttgatatctgctatgatcatgattggaatcgccattactggtatccaatttgtacaaccatacgctgcactgttcctcaaaggagttggcatcagtgacccatatttgatcaatgttatcatcggcttgtgcatcctaggaggatcattttttggtccgttcattgtggaatatggcggaagaagaattgccatgctttccggctatattgtcatggctgtctgcatgctcactctttcctctgtgagcaccgctcttggaatggatacaagtgcagagatagttatcgtcgttcttctgtgtttgtgggcttttgtctttggtgggactattgctgcgagtgctaacctatcttctgtggagatgcacagcgtctcactccgcacttacggacaagccaacacaacagtgttctatggtatctttgcctttggtgcaacattttggacgccttacatgttaggtgcgggttatggggacatgggtcccaacgtgggctatttttatgcaggtgtcaccgtcgtcatcgctattttaacattcttgctcgtgccagagactgctggaattacactggaacagattgacgaaggttttgactcgggaataaaggcatggaaaacgtcactacccaagaatagagctattgcttcctctcagaaacgaagtatggcaggtggacacgttggagcttgatgaatgcttctgaagcgtggtcagttggctctgaatgtcataaaatttataaattatagtatatatagctcgggattatcaggtttgactctaagctctaaacttgcaacatcaacttccgatggatagatgatagggaattacctacctaaagtgcagagaagccaaatatcacgcagtacgcctcgaaccgcaatgatcacctaatatatatatatatatcggatctctgtccttttcgcggtttcattgatcccacctgaataatttcaatatttgacgcttttctcattgatacccatttctagtagtgcaaatatacacaagtttcacctttgctttggtctgttgaactaattgtaccgaagtgtccacataccttcccccgcctcccgccctgcgcgccccgccgcnnnnnnnnnnnnnnnnnnnnnnnnnnnnnnnnnnnnnnnnnnnnnnnnnnnnnnnnnnnnnnnnnnnnnnnnnnnnnnnnnnnnnnnnnnnnnnnnnngcgggtgcggggggggggggaccggggggggggataaaccttaactaagcggctcggcagcctccgcaaaccccgaacgaactacactaccttttttatttctcaaatcaggcgttgcgaattccgacaggtcattatggctcttacaaataaatattaatgtgtagtcacagcaacttttctcaccaaatgaattacgacgcgctgcgagctgtgagttccatcacatggctttcagcattcgcatactgatgatattagtgtgacctttgcttctcgagaaaggttgaagaagttcatcgagtgtattcactgcctagagactgatgctttcttgataggttcgctgtgataaacaactacattgtgcaaattgtaccgatgcaggcgttgagtgcagtcgtacaagagctcgacgacctcgccggcaatcaccatcggtgtatgttttcatatgacgctatttcgatctatgcttactatatgaaatagcatatctgctctcggggaaagattgttaacattggaaagaacagtttcagagtatgattaccattcttctttacttcaatgcttctgttgattgaccatttaggggcattgaaaatagaattccatcaaatgttactgatcattacgatggaaatatgccgtcgaaaaaaaggagattagagcatgcctcgccaatagaaggcactccgcaacctacccagaatgaatgtgccattggctcagccacacaccttgcagagaaggcaagaatcgttatacaaggagagcttgatggaaatgagtgcatggaccgtgaacgaaaggcgattctcagatctgccctgcagtttgtggatgttacggggcagaggagaagctcaattaccgacaaattttcgccattagaagtgtcgcatgaagattttcatgatggtccatttattgctccatcaccagagctgctttacatgcttcttccgggtataaaaagccatctgaatttcaaatacatacactaataataatacagagccaacagctaccatcggacgttctagttccgtacaatggccggaccacatctcggataaaacattggagaagatggcttcaaccattctcagtgacaatgaccttgagcatgggcaggaattctaccagtactgtatatgtgtttacgtgaaagccatatttcatcttttccaaaagccgagagcatatatggatccccgcatcaacgcacaatttctgaagtccaagaaactatatgaaacatatgccttccgtgctctcaagaggctcaatttcttgaatgccccaactcttcctctcattcagtcgttgatatctgccgtatgttatcgtgcttccttatacgaaaagtcacttattgataactattgaacaggcatttttcatgcagtatcttggcaacatgagtcaatcctggattttcaactcatatgctgctcgtttgataactgctctgggttatcatgaaattcgcaatccgcctgggatgtcaaacctcaatgaagatatctatagtgctgtatgctggtgcttttaccttgaccgaactctgagcacccttctttaccgaccattgtcgctgcccgagccctgcatctctcctgcaaatctgattagcgccgaccaaaatttgccacatatcccattaatacgaattctgttcgatctagctcaggtccaaggagagctgttgaattgcggaaatgcagataacactcgccagataatcgccaatcattcaagacttcaggaacgaatggaggtcatatattcaagattacaatcagtgagtttgactaaatgtctgccttccttcaagctaacttcttgttttagagtcgagtcacagcccctgactgtatctctgcagattggatctcaggcgaattttgctattacgccattctggttgatatccttcgatcgcgcttaaaatgtgcattttctcctttgacacacaaggaatgtgtatcatattctcgcaaatctctcagagcactgcatcatcttcagaaaaatctcgcggatgttccaggcttcgtggatccttatccctcattcctgacatggttagttggtctagtttcagggttataagttcttccactgatatttcctcaggactgtccttctatacccattcagtccattcttcgttctcttttgcaacatcattggagaattagacatggatgactacaatctaatgcaagaaatcacacaaagtctatctcagttcgccgcaagtccatacatctcaaaactgctgaaacttctgtactacttgcagaatctctgcgtaccattgatccaagccaagcagcgtatgggcccgcaggtcaaagttcctacattgtacccttcgatggctgggacctggcatgtgggcgatccagctagtgatgaacattcacatctcttgatgtctagctctccatatgtggatcctgtcgctgaaacaaaccttcaacaactacaaacaaccagtgatggaagctatgcacctgatgatgcgttgatgtggcaattattcaatagccaaatctcgctggagtggttcgagtctaaccctttttcttattgagaatactcgaaacttctcatttccttgtttatatatagaaaagttgtctgtacgatttatgcttttaattttatatacatctaaaacttaaaaaaaagaataccaaataaataaatgacctcatgcggccggctattcttatttctaatcctttgatttctttgcctttttgtttcacgactgcttgttacttgcttgtctgtttctgttcagattttgggcgcatactataacaatattggcatgctattgccctaaccaatctaggttttccctaaatctctagagttattttggcgaaaatctactgtttcccaactccagtcattttatatgtactagttagttgtggatgcgtacataatagtggggccaatatggctcagcctctcagcctcagcctcaagtgtggctgattattcacagtcttagactgaaggcctattacctgttaggtagttatgacagtttcatgagacgcagttgtgatgctaagccttcttatgactcaatcgcaaacagagggcatttacctaggtacataatacataatatataatgtatgggagccattgtcggggaagaatctataccaatctgaagacatctatatatgtctcacttatagataacacattacacattcaagtaatattggaaatattcgcagacaaccgtggacatccaccatttaatatcattccaacaacctcggaataccagcggacatagtgcaggtcgtggcaggtgaaccccgttggcggtggagacagtgcctttagcgtgggcgcagctgattccaacacacctcaaatcttacccccctcaaaacaacctcctagttttgcatctttactagacttggtttctcttttaccaagactagtatatcgcgctctacggtttcattggggatgcccagagtcagctcttcggcagcgtgttactggcccgcgtggtcgttcccctcattcttgaaatcagtctgatttgctctggactagtcactcgttttgccattcacttgagtgcccaagacttcaccccacggtcctactaaacaatctctcgcgcaattctgggcgcgtcgagtagagccgagccgagtcgacatctggtcggacccctccgaaatcatgtcgcaatatccaaacggtcaacaggcatactatggccaatctacaaacccccaagcccctactcaaccatccaccggccactatgacaattatacccccgcgccggacagacatctgcctcgaaggatgccgagttacaatgccggggatgattctggattcttcaaccctgtccagacccagaatatgagagcgaccgaagaaaacagccagtatgcagcacaaggcggtggttatggtggcagcgcgggacagggtggctacaatgatgtgcagagagcccctgaagacgacagagactcgagatattcgcggacttcctcagacgccatgtcgcgtatgtctccgagtcgggcctcttcgcaaacctccactatgtcttatcaataccaatactctggagcaccctcgtcccagacggcctacaacccgcagcaatacggccttccacacacgcagtcgcaaccggttctcgcttataacccccagacgtacactggctccagcaatgcttcatacgccggtcccgccttgggccatcaaccatataatcctgcggcataccagtctaccgcaatgtcgggaatgagctctccggttctacctagaaggcagagcgcagcttcacactacgggcagacaccgccgactccacaatcgtatggcttttcccaacaatcaccgcttccaccgccaaggggcgccgatcatccgtatggaggacgtccgtaccaacccatgtcaccggtcacctcgccttcctatgttccctcaagctccccgggcataatgcatatgcctccgcctacatcacgttcttattacagcaacccacaaggggcgtcgtatgatctgccatctcctcggtataccccagcgatcccaagcggttccttcgaagagcagcctccggcgcctccagttcatcagactcaagcaaatggcttgtacggcaagcggccaagtgtagcagggcgaaccctgccgacgccccctgtgcagctagacttgcctcaacatccgaggcgaactgagacgttgactcgacacccccagtcccggcctcttcctggacccccagtcgatgaagctgggctagatggcaatcgttggccagcggaacctcctatggcatatgaaaatgtgctcagagaagatgaggactctcagaacttttcccgtcacggctctagagcatcccatgctagctcccattcacgcatgcagttcttgccggatgaggaacaaacccacaccaacggtaatatagagacagacactggtcatatgataaatgacgatgcctacagtgaggaaagcgacccagaggctgctgctggtttgattatgttgcaagaagacatagcgcgtgaggaacgtgagaaagggcggatgcgacgtgagaccaatgcgtcagttctcagctcacgtggatccaacatatcgccaagagagccttcaccgcactctgattcacttggagataacgagttcatcggccatgacctttcgcaggacgaagggggctaccaagcaaacgtgcactacggtatttacagttcggaagagtattcggaccctgccgcgggcgacagattcccaggcacctctggttcattcagaagctccgggtcccccgatgagcgtggggagtattataatgattacgagcacccgcctattgcatatgattatgccaggcgcctccatcatttgccggccgatgccagggtagatgccagtggtactgggggattatcggcaccggatgcctattcccgacggatgagctttgactatggcgatgaaggagaatcaccatatgatcacacccattctggagatcaatccgatgacgaaagcgcccaccgatccgcacacgaagatctgttcttccaccctggaatgcgtccattgccaccagcacctgtagagcctgctggtaatgttgatcttgtgtcacatctgatgcctgcgggcacatataaccgccactcggagcagcaagatgacttggacagctattcacagtataacaaccccgccttactgaactctgcggattcttatggcgaggctttgctaaaccagtcccaagttccgcggtcgtcatctttgtcagctcccattgggcctcgtactgatgcacccatcagatcgaagaccgacgcggaccggctcagatacaggcagcagcagcaagaacttctcttgcagcttcagcacaaggacctgcctcatatcgacccagcggcagcagctatgacgctggatctgccaagcatcccggctggccggcgcaagagattccatcctgcaaagctgtcatcggaacaattcaagaagtgtaccgagccgtgggctttgagctctctcttgtcctggattaaagatctgagtgaggatgaaacagatctcagagagcaagcaattgccgatgccatggttgcgttattcactcacaaagtccccaccatgaatattgctgatgccgagacactggctgctcgagttgtgagtggcatgcttgaagaaggtgcattggtaaaagaagaagaatgggtcaagtttggctcaggcactctttcgggtatcctgttccagatcactggcactggatgttactctcccaggctccacttacatgagatgcacattgaggatactgatagcttcggtcgatgctactctcatcactgtatgcgaacattgaagaaggtcaacctcaaggcacagatgatggcaccgcagaagaaaatcgaggactgggtcactttctacaaggtccccaaggaggtctgggaagctcatccgaggaaagaggtcgatcgacagaacaatctgcacgaaattgtcactacagaagactcctacatttcacaactggatgtcctacgagaactatatcgtgatcaattggctaagatgaatcctcccatcattccggtgaagcgattacccaaattcttggccgacgtgtttggcaaggttgatgctgtgaagagagtcaacgaggatttcctgttggcccagcttaaataccgccaaaaagaacaagggccttttatctctggattcagtgacatcttccgggaatggattcgcaaagctaagaatgtttacatcgactacgctgcaaccttcccaacggccaactatcttgtacgcaaggaggctgaacgcaacccgcacttcaagcaattcctaaaccaagcccgggaacacaagctatcaagtcgccttagctgggatactttcctcaaagccccgatcaccagaatccagcggtatactcttctgttggcgactgtccacaaaaatatggtcaaggattccgaagaaaaaggaaatttggcacaggccattgaagaaatcaaggtcgttgcgctggagtgtgacaacaaagtgggagagatgaacaagaaggccgacttgatggagttggcgtccaagctgcaattgcggcccgacatgaagaaggaagttgaactcaaccttgaacacttgggtcggcagatcgtctatcgaggcgaactgcaacgtcctggaacccgtacaagattccttgttgatacacatgccatcctgttcgaccattatctcgttcttgctaaggtattcacgatgcgcgaccgggcagtgaagtacgagcgatacgatatctcgaaattgcctatcccaatggatctattgggccttgaaagcaccgacgatgatcccgtggtcaaatcatcggtccggggagtttcgactgtcacaccttcccaagcaggtgctgccagccctcttgcacatacagggtctggtgcttctggaggaaacggtgctcttgacaactcaagggatgacaagattctataccctttcagaatcaagcatctaggcaaaactggaacatatactctctacgccttttcagcgcaaagccgcctggaatggtgccaaaagatcatcgaagcgaagacaaagcatgctgctgctctcttctcgcaaaatgccgagccattccgactgcgcgtgcttgcggacactgcgttcgcatactctgatcatacacccggctctaaaagtgtcaccatcaagggcacccctctccatcgtgcgattgtggaggtcgagaaacaatatgaaagctctaaagctcgccctcctgcgatatgcaagactgcagtcaactgtgccacggtgttccaacagccacctgggcggattatgtgtgcaattggcacggactatggagtttacatgtccgagctcaataaccccaggggttggtacagggctattcccatcacacgggtcacacaagttgctgtctttgaggatttcaatttgctgttgttgattgccgatcggtctttgattgcataccacctcgatgtggtctgtcccgccaatgggaaaacctcccaatcatctcaggattctgcccgacgagcaccgcagaagctgtctggaaatcgtgaagtgggcttctttgccgctggtcgcctgaaggaccgctacttggtcttatacaagaagcgtgagggtttgtcgtctacgttcaaggtatatatattcgcagcaaactcgataaagtaacagcaaactcacatacaaaatttaggttctcgagcccgtcctgcaaaaatcatccacaaataagggccgcctgttctcacgtcgctcgcaaacggagttcttccgcgattacgacgagttctacatccctgccgagacctaccgaattaacatgttccactcctcgcttgccatctcaacccaaaagggcattgaagtcctcacccttgacaagaaactttcatggtctgtcccagattttagctccaacgatactggagatgcacacgataccctccacagcattgccaatcgcatcagcgggctcaagccgctaggcatgttccgtctcagcgagagcgagttcctagtagcttaccagcagtgtgctgtgtacgtcaacaagcacggcgacgtctctcgcagtgtagtcatggagttcgtgggcagcgcacacacagcctgtctctatggcaaattcctaattctcttcaacgacgacttcgtcgaagtccgcaacgcaatgaacggtcgcttacgccaggttattccgggccacaacgtcgtctgcattgacgacggtagcaaggtgcctggctcgctcaacggcaatgcacaagccaacatcggtggctcgatgggtctttcaagcggcttctctggcgcggccaatggctccccgggccccacgggcatgggcaacacggtcaaaatctgcatgcagcatccagagtatgagcgaagccagcttgtcttggaacttgtcgaaaatgaggggcaaaaagactaagtcaataccagtcgaccgttttggggtcgccctgcctcatattttggtctcattttgggtttcatacttctcttggaacttcacccccttaccctttctcttcgctttttcgtacacctttcattcacccctttttcaacatccctttctacttttgagccttttattctccgccgtggttacctttcctctatagagggtggcccgattcttcatgcctatgcttgttttataccctttttcttcctctcttgcgtgtcacacaatgccattatacttctacgtcgaacttctacgtcgaaggttgatggtgattgatcgcttccacccctgggattgttccagtcggctcgatgatcatgctgtacatagaaaacgtcactgcatctcatgacttgacgatttcctgaattcagaacactttagtatcctgggcgactttgcccctacgaatttgattagtggaaacattcaggtctcaaatctatcttttgatttcgacatatttattcgaatcgcaaataccatgtaggatttggtacatgtacgaagagcgctacgtcgaatccacatgtctaataaacaagaaaggttcattctttctaagagatctagaactccaggttccaatccaaggggaaccacgcaaaaagtgaattgaaacatccaatccaagggttgtagtacaaaattgcataacgatccaactaaggattcgggaataagaaaaacagatgagatagcggctaaccgtatatgaaatgagacagtatgcaagaatatcatgagtcaaactcgacgagcttgctgataacctctccatcgcgggccgtggaagaatcaccgctcttagtggaagcagcagagccggagaccttccgaggagcgtgggtggcatcatccttcccgtccaagagagaagttctctcttcctttccgccgccaagcacctcagctccttcaaggaggtcacggtcagcgtcacggacaatgctacgacgttccgggtcggcgccgtatgcgccagcgccccagctggggataccaccggggatggcggtggcagtgttctcacgacggggatagtcatcatcgtcttcatcgtcttcttcttcctcgcggccgtgagcgagatcacgctgcgcctcgtccattcgcttcttgacttcggcggccatgcggattccgtcggagacgatgttgtcgaggacgccgcgcaggcccttgcctggtggcacgatacctcctgaggcgccagcgacgggcgctgagccagcgctgagtccggaggaacggacactgccgatgttggagaaagttgtgagattggacgacattgaggaagatgcggctagagccgcggggtggggggggtcggacagatggaagggttgggggaagtnnnnnnnnnnnnnnnnnnnnnnnnnnnnnnnnnnnnnnnnnnnnnnnnnnnnnnnnnnnnnnnnnnnnnnnnnnnnnnnnnnnnnnnnnnnnnnnnnnnnnnnnnnnnnnnnnnnnnnnnnnnggaggggggggggggggcgggggggtgggggtggtcggacagatggaaggattgggggaagtaggattcaaagaattgctctaggagttcgtcggccaggacaaccattcggaaggtagggagagtgatatgcaggggattattagggtcgagagccgggttggcagactcagatgttgagcggttgtggtcgcgactgtctaatccgacggtggtagacttagctgactggggagctgcgtctggtgctggagagttggtggacttggcatcatcaacatcgatcaaatcttcttcgtcgtcgtcgtcaccaatggcaaatgagtctagcttctcggttgcctctactgttgtatccagcaggtctgcttggtggttctcttggtggctagggtcggcgtattcgaagcaacgacggatgaatgcgctgacgctaccgaggaatttctcgtcagtagtgagcgagttctcaacaaagtcacggtctcccgacaagttcagatcttccacagatggggtggccgtgattgtgccctcgaacccacgccgggagagaaacaacagcgcctcggacatcttgaggatcccctcacgatcaacctggccatttccactgtcatcgtacaggtcgaagaaatagttgatgttattcatgatatcaggggatcctttaaggcgggcaagaccattcaccacattttgaagattcaatccctcctcgggatctgtgccccacttgcggtagaggcgttgcataaactcatggtccgctggctgcctgcggttcgcccacaatgctgattttcctgatggggattctctcctcgagggactaggggagtcagcaaccgcccatttagatgtggcggctaaaaactcccggaaagcatcataatccatatgtgtagggctaggtccaaggccaacacggccaacttcggtgtctgcaggaggggcaagcatggaaaggcgttgggatttcgatttcttcctctcttgccgcctcgcctcttcctcgataactctctggtgctgttcccattggtacagcgtttcatagaagcggtcatatatcgttccaagatcatccacgctcaggcgtttgctctcgggtccaagattgcggatagaagtacgctttgcaaaagtctcgatattctctaagacagcacccttgtgcttttctcgcgtctcggtgatcgtgctgtgagtgatgccagaaaattctttgaaagcaaccaccattaattcctggaatctagtaatagcccgcagcttgggattctccgatctcgggtgggcagattcatccaatcgggaaaaatatgacttcaagacagaaataaatgatccgtcatcttgtgtctcgagaagctcctcgccgttgactcggaggatggcaagaccgacctggaagaggacctttggcccttctaggaaaaacacatccaagacacggaaagcaaagacgagcggcatagagttaatgtagagagaaaggaaccatggcaacgataccacagaaagttgtacgtctgatttggtgaggtgatcccagagaaccggcattgttttctcaactaaagactcaaacaccttttgatcgagtagtgtgccgtacattgtggttgaatagtaaccgggcaggagacggtcacagagcacagagagaaggaaaaaggcctgggcctctgacatatatctggtcaagttagcaaaacgccctcggcaacttgggattctaaacatacatcaacaatgcggcaaccacaatgttcatggcttggcaatatccaatctccgggtcaatccaactgtacgcagtgagaactcgtcgcaagcgtccaatgccttcttcgctctggaatccaggatactctggaagactgcgattcaaatctttctcaatctcatcgatggcaagggattcttgtccctcgaacttggccaatgtctgttggtacagctttggagattgtagacgaaggaacaaagaaccggatgtgagctcccatatttctcctcgtagccgatttggcaaaccaactctgattagcttgtggaaggttggttggcgaaccaaagtagcattccgaccattttctggagaatatcagtcacatgtcggaatatacaatcaaaaaagaatgtctttttacctctgaaatattcgccccaaagtctcatcttactgcgatcgcgcagcttgcgtgcatcaccagggtagcggaaaattagacccagccccgcatccgggggttgacgagtatcagcttcgttcccgtcttgtccctttcctttggcgcctgagagcaaatattccgaataacaatctgagacgacggtccgcaagctgtcaacctccttcattgcctccctcaggcctttttttagtgtgtcacaaaatcgctcgcaggcctgtctgctaccgacaagctgcaatatgaggcgttgaggggcgaaattgggttcttgatgcttattgagcaaaccattccatgttgtcagcgccaaagagaaaacatggctggcgctatgaaggcgttcgacacgtcgtatgcaggatagcgggaggatgaatccattgcctgatggtccagtgccgtgcgtttggccagtccaagtggtcgaggcacttgctgtagcagatggaatgaagctcgtgggctgggttgaaaagcagatgaaacgttcacttagatgcaaacgtccagtgtatgtattcccagcccggtcaaccctgcgagtgccatctccttggtttgacgaggaatttggtagtggtagaacgagatcagcggtgatctcttgaagcgggttctgggaatcagggaggcggaattgttgccggaacaacgatgccttggaggggttatgatcgggcgaggatagggcggaaatgttgaaattggcagggtcaatcaggctctgggccttctgaacgaaggacgaccacggtatcatgttggagagatgagggtgtgaattcgataaccaatgatgtcggaatcaagctcagttaaagacttcgagttcagcagatccgggctaggagtaggaaaaaaagcccgtgcgtagttgaaattggagcttcaaggtcatcgtacaagctaaatcaaccttggccgaggactaggcctgcagaacaagaggattgcgtcgagtgttgttgcggattgataagagggggcgtgatgatgctggtttcacgtgactgtcctcagccttatccataatagcttggcatcacagcattcttcgaaagttatacgtggaaatgtcctctacagtaattattcttttcgccattctagccttagatattatacaatcagcgctgtaggtcagtggctataaggggagggacatctaccagagattcaaagatatcgtacgcagtgtttacatttgtctaactatatataacgagtgtgaagttaatttctagttctataatatgccccactgtgagtagtacaatggtctacgatcctacagtctacagagaagagcctaagaactagagattctcaatttatgaggcttagttgagatgaatataaacactgcacaagaaacacaagtctgagacagaaggacgcaaacatattatgatcggacaaaaatggggaattgaaacacaatccaagcttgacacggaagcaaaaacacacacatttgaaaccaaagaaaaattgagaatagaacaggatttgagaaatcttaatagagtgaaagaaatatagtgaaagaaaatatcggaatcaaacaggatgtaggtgaaatagaacggtgaaatagaacaagaatagcgaacaagagaagatttaggaacagaacaagaaacaagattggaataaaaccaagctcaacgcaatcactagacattgaaaattgactgtgggatagcctagtggtgtcaagagggccttgtaagaaggattgaacatgaagaaaagaaaaagagcctggatcggctagtagcggtcacagggcaaaagacagtggaaaatgaaattccctttgttcttgtcaagtgaccggagctttcagttggcggtggaaaagaagtggagagcccagtatagctggtgattgatggacatgccatgggtcaaacgacagcggaactttgtggatttgtttgtttgtctttgttcgtgtcgatgaccccgagtaagatgggcttagtgcgtgctggcccattggcctggcaaatgagtggaaagcctaggcagtctggcaatgagatagctgagcgttgttgtattttttttttactttgcttgtggttggtcttgttcctgcttgatcttgtttctgtctttatgtagtgaccggtggggggttttttttttttttgttggtattgacctcgtcaagtcaccgttggcgccagagagcttgttgttgtccggagtgtcgttcaagtgaaagatattgaaaggtccaggtagcttgtgatggcctttggtcgaaagacggcttgaaggagtgcattttgtattttcatttgtgtttttgtattttttttgtattttttggttcagtgatccgcgggtttgggctgtccgtggaaggagccgagaaacccccaagtataaaatcgagcactatccaggcaggtcgataatggccttcaaacaagagacagctggcctcgatgggaagatcagtatgtccctttttttttttttttccctcctctttctctttcccttttcgtttttcttctttttttttcttttctttctttagttcttgtcgagcgagcctcggacctgcgaaggctctgtgtattcaggaaggacttcctcggagggactggtcataagaccctgcttttcgcaggcctcgccatcctcccaggcggccttgcgctccgaagaagtggtaccgcggtagcgttgccagaggaaaaccacagcctggccgaccagcatgccaatggcacttgcggtcagtccagccaggacacccaaaacagccgggacaatgataaagtgaacgatacgtgaaaaagtgcgggcgaaagcgccgtggtgcgggtggtgatggtggggacgagcggagccgtgggcgtgggcatgatgaccaccggggccgaacttttcacgcccagaaccctccttcccgaaaggaggcgggggagggtaaggcatatcgtcatggtcttcttcgtggtggcccattatcttgccctcgtgtttgccatggcagcccttgtggccggatttggccatgcccatcacacgagccttggcgccagccaagaggccccgaatgcgagagaccagaagttcttgcaggcatttggccttgccgtggcactccttccaagacaggcgatcggaagcaggggtgttgctttcgatttcagtccgagcgatgaagagctcgccgttgggatcctgtaggacggtgatcgccacagtatcgacagggacggggtgggtttccaggtcgagaacagtgaatcgaatatctaggagttcgtatcccggctcgtcggatggtacggccatcggcatgatttcaagcgcatacccaacaggcatgggggcggagtcctctccctcttcattttgttgcacagcaagaatcgggatgggcggagccggtgggaatatttggcggccgttggccaacaggcggttgtcctcgatcgagaaatccagagtctatgagagtttgttagccagttcgaatgaataaacgcattttgtcattcttaccagagatgatggtttgccctccgtccagataacagcaccttcgtcattggtttcacgaagaggacattcagagcaaggcaggtcaacaatcgcatgacgaacgtcctccagaagcatagggtggatattaacaaatccatcttcaataatatcgactttaggttccatctcggggacgaccagcatggcactggcgccgagagcagcggcgccacccagcaaaagggagcgcacaaacatggcggtggtaggaaatgatgcttaacgcaaaatgaaagtcaaaagcaaggcgatgcttctcttcttgaagttgatgagatgagtagactcaataacgatgtggtgaacaatatctcgagggggtagataagtgcacttatcttctttcagcgggatgtggagtgggtgacgccagctcctgcgtggctcgtgctgtcattggtccactggtggacagtcagcctgctgactgtgcaggcggcatctcccgggcttggacaatcgtgttcttattcgtaggctccagactgaacggcgacataccgaggtatatcgttcccctgatattatttaaaaatgaggatggcgaggactccagtcctatgcctatcgggtatgcattcgaaatcatgataatgtctgtgcgatacattcgcttctagctaccaaaagttggcatgtgctgtggacaaaaacatggtactgtggtatacgttccgaggtgacgaaacacaacctcgatgctagcgtgtgttgctagcgtgtgtttttatccaggcgcgaaatgcgcatagtccgcctggtgaacgtgcaggaggcgcagtttgtaaccgtgccacgcttaggtgtatactgcaatatcatgttttcgagtttctgggagatcatataatgctcccagattccggagctggcggttgttataaattcgcatggtcagcctgctgaacgtgcaggtggcatctgtgctatgttgcctgcccctgggagctcatttaatctccccatctcccagaggctagctgtcattgctgaaattggtttgttcagcgggccaactatgcagatggcacccgagaagcctttgcgcagtccacccatagccgactccagaggtatggctgtcgctggattttgctcctatgccatgatgctagctcctgggagattaatgatgttcccaacccccaggagctggcatgctgttgtttgatgacggcatcggcacggccagcctgctgcacatgtagacagcattagatcgtgttcatgccatattgccagcctgcagaagatcatataacgttgctacctcacacaggctgccttgtcgttgggcgaacaggcttgttcagtaagccgaccgaccatgcagccagctcccgagagatcatacgatgccccccatccctaggagctggcgtactgttgcaaactgcatggtcagctagcgaaacatggagatggcatcatatgccgcgtagccagcccatgggagatgatatgttgttccccgctcccatgagctggcctattgttaacgcgatgttgtcaaccactaggagatcattgatgtcccaatatcctgggggccgacgtgttttgagtgaatcggcgtgtccagcaggccgaccatgcgatcaactcctaggaggtcgtgtaatgttccccattcctaggagctggcgtgttgttgcgaagcgcatggtcagcccgctgaatacttgccatattgccagcccctaggagataaaatgatgttcctcatttttaggagctggcgtgttgtgagtgaattggcgcgttcagcaggctgaccaggcaaccagctcctaggaaatcatataatgtccccatcctaggagctggcatcttataggtgaattggcatgttcagcaggccgaccatacggtcagctcctaggagatcgtacgatccctattcttaggagctggcgtgctgttgcgaagtggtatagttagcctgccgaacatagagatggcataacgtatgccatgctttgccagcccctaggagatcatatagtggtcccatctcctaggggctggcgtcttgtggtgaatgaggttcagcaggctgaccatgcaacagctcctaggaaatcatataaatgtcccccatccctaggagctggtgtgcttttgcaaactgtatggtcagcctgccgaacatggagatgacataacgtatgccatgctttgccagcccctaggagatcatatagtggtctcatctcctggggtccggcgtcttgtgagtgaatttgcgtgttcagcaggccaaccatgcaacagctcctaggaaatcatatactgtccctctcctaggagttggcgtgttgttgcaaagtggcatggccagcctgctgaacatggagatggcataacgtatgccatgctttgccagcccctaggagatgataatggtcagatctcctaggggctggtattttgtggtgaatgagcgtattgggcaggccgaccataccgccagtccccaggagatcatataacgtctccctcctaggagctggcgtgttgttgcaaagtggcatggccagcctgctgaacacggagatggcataacatatgccatgttgccagcccctaagagatggtaatggtcagatctcctaggggctggcgtcttgtggtaattaagtgtattcggcaggccgaccatgccgccagcgccgaggagatcatataaagtctcccttttaggagctggcgtgttgttgcaaattggcatggtcagcctgccgaacatggaaatggcataacgtatgccatgttgccagcccccgggagatataatggtcatctcccagaggctggctaatgttgccgcggcgtgttcagcaggccgaccatataggcggcattttttgtgccatattgccagcccctgggagatcatgtactgtcctccgctcccaagagctggctgttgctgaaggtggcatcgtcagcccgctgaacacgcaggcggtagtctcaatttgtggcgtcacaagtcgtttccatgtgcaggcaaaacgacgccaatcgcacatcttctacctagtttcctgggtagccgaataatatatacccgaatataatatatactcaagggcccagacattgtactcgaacaagacgtctttcgacgacaaaaaaatcacacttcgccccgaagggtgaacaacaaacgaatcgtacatgttgtctttcgacaaccgacacaaacaatcatacaccaccacgaagggtgggcgaacaagaaaatcaaacacaactcagaacaggtaccccgataaaatgccatgggcgtcgacagtgataatcatccatcaccttcccgggtgagagaaacaggggtactcaaacaatggcttcttatttcggtgtcgttggtaacagacacctgtcgctgtaactgtgcaggtgaagtggcaatcatcggacttgccagcttgctgcattgtcttttgcggtcccaagaggtggctcattcgtccctcccctcgggtcgctttcgttgtacttctgcagttgaagcggcaatcatcggacttgccagcttactgccttgctgtggtagtattattcatcaagaggtggctcattcgtccctccccttgatgggatgcgcaccgcaccactttccgttaaccgaacaacgcccgatcgccggcaaaacaacgaaggagaacatagataatccgatcgaagattggaacgtcatatccgtgctcccaacgcagttcctccaggaactgttcaggaccctccaaggcgtagactaggtgtccaaggtgacctgcccacagggggaacgacagcaaaatcaccatcaccatagcaaatacaccaaaggaaagtcgacgagttcctgtccacaaccccctcagcaaagccgacccttcatgcatgtctgactcgtcagacacagtgacggcgggtgggtcggaaggccaagctcctggcatttgaagaccagaaggcgctgctccgcccatttcctcccgctgttctcctgtattctgtcgagcgctgcaatttgaggtttcggcatcctcgaccctcttggtgcctttcgaaacccccgcacgggaatctgtccctgttgcaacggcattctttaccgaagcgtcttcgggactggcgaccagggaaggggtggagatagctcgagaggttgctgtgacctgcaacccctcaggagacgacataatgctaggacgagcttgagtccttgccgcgcgcgcctcaagcaacgcatctaggtgcgagcgagtaactgtccgcgggctcggaacaagttcatcctctgtctgccaagtcagatctgattcattccgagtcggcttagtagcagcaggcacactcggaatgtcctcgactgacgatggctcagtttggactgactcagttggggctggctcactaggagcaggcgcacccacaacttcaccggacaaagtgaacacggatgattcgagcgtagtggactcgggcacagtggactccaaggcagcttgagttggctgggaaacagctggctcgctcatcactgcttcgggatgcacatgcacggtcttgagagtctcatcttcctgcgatgcaacttgagtcggctgagaaacagcgggctcacccaagattgcattgataggaacctgctcggtggcctccaggacaacttgagtcggctgcgaaacagctggcacactcatagctgtctcggtgggcacctgctcggttgagacagtctcggtgtacgccagaacagtctgagttggctgagaaacagctggcacactcatgactgcctgtgtagacacctgctcggcctcaacagactcggtggactccaaggtggtctgagttggctgcgaaacagctggcacactcataactgcctgggtgggcacctcctctgtctgaacatgcacaaattgagctggctgcgaaacagctggcacactcatctctggcacattcgcggctgtatgcgtcaacttttgtttcttccgggctggctgtccgtcctcgctggacccaaagatatcagctgtccgtttgagtactcttcgtacagagagatagtcaaccctccgatgcacgcgagggcggccactcccgacgagacgatcccgtcgtttgaagacgcggaagcggtcgcggacccttggcataccaggcttgagagggatggctgccacggcctgcgcgatgacgcgattaagtgatcgcgtcaatgggagagacgggggagcgatagcagcatgaccaccagatgactggctcggagccgccaggtcatctttgttgtacagtgtgatcacatgcgtctgccccttatcccattccatgtgaccgtcaaaggactcgtcgttcaactttgcgacttcggaataaaacagctcgtcgtcgagttccatcatgtcgttcgtctccacttgctgaggagcgatagtcaaggtggtagctagtgcttcttgcaccactaccatttcgtcgcacacctcggcctgcaacatcccagcaatttcttgtcccgtggtctcagtactgatatccacggtctccacctgctggggagcgatggtggcggtggtagctagtgcttcttgcaccactaccatttcgtcgcacacctcggcctgcaacatcccagcaatttcttgtcccgtggtctcagtactgatatccacggtctccagctgctggggagcgatggtggcggtggtagctggtgcttcttgcaccactagattatagtcgcccacctgcgactcatctgcctgcaacatgccggcaagttcttgtcccgtggctgtgtctatgtgtgacccagcccgtgatggtttttgactgatcaatgatctagtatcgtcccggcgcgagcggaagttagcgtgtcacggtccccagcgaatcgatcgagggacgattcgcggacggagagagggaataccagtagaatcatagacatcggggctaaggtcatcacattcgcgatcctcaagggggagcgatctcgggccacgttcttttcccttgtcgagctgctgcgggtgggggtcgaatgcctgcccgtgggagcctggttcctggctttccacgacgtggcggcgcgcaatacccacagggctagccgaggactcggcgctacttgccttccgagtctggacctggcttacccttgtgctttgcatactcgcggcaagcattctatccgcattgtcaaggaggcctttcagtcggtcctccgcacctgcaaggcgtgcctgtcgttgctggtttcggccggccgccgcaaccacctggcaaaggtcccgcaaatctgcctggtccctcgccagcttctccttgcagtcgcggagggcctttttcttgccctccgcttgctccaggtcaacagatacctgctccaggtcgtcctcaataacctggaactggcattctatttgcgaagttctgttggagtttgcctggttgatcatggcctgcatctgctcatgatcgagaagcttggtggtattgcggtcttttgccatttgggatcgcaaagccgacgcctgggacctggcgtcgttcagtgcgttctcctgacgagatattgtcgcttcggcatcagtcagtacttccagcgcgctggcttcaggctgtttctgaggtggtcggataccggagggggattgaagggctgtgtcggggcccaccagaggggaggtcctgtgcggaggactctggggaaagtaggaggggcggtaggtggatgagggacggtagattggtgaaggtgtggccgacgaaggaccaggcaccacctccgtgccaatgggtccattgcggggaggacggtacatggctgtcggggaaagcttgtcaattgacgaaggaccaggcactacctccgcgccaatgggtccactgcgggaaggacggtacatggctgtgggggaaagggtggcaattgacaccgggccaggtaccacctgcgtgccaatggatccattgcgggaggggttggctgaggcgatcagagggatggcgggggtgggggcacccgtcatttggaacccagtgacgctgtcacggcgacggcaggtccgtttctgttggtttgccattgcgagctttggaagatgttagaagagaagctggaaaaggttgcttgtgaaggcaactgtactcacagaaaaggggatgaaatggcgcaggatttggatgagagtctcttctcaaatactatgggataaagtgtcagaaacggcagataggtcacttggaagagtggttgggactaaccagaagaagtacgtggattcacaaactgtttagtctttgcagatgcagacgaatatgaaaaccgagtacgatgtggaagaaagagagaggggaagaaagaaagagaaggtgtgtgggaagggcagaagatatagccctcgacaaacgacgtgactcttgaggcccaggctcctcaatggtcaatggcctgactcaatgactaggtcttgcctccctggaccaatcaacaggcttcctcattgtttgtcaatggcagggtacttcctcaacaatggctattatgacatgttcaataaagagaacaatgggttgtctccttggtgccttgaatggtctttttctaggaataggacgtctcgttcaacaatacaacacattaatcaaacttctgaatttatgtctattcaactgtacattttctagaattagctctgcctagatattgatatatgtagatgctccatgtagttgcggctgaatgtggtcgacttgccgaaggtcagtgcacttggcttactgaatagattggtcttccttggtttgatgaatgtattgcctactctgtgccagttgtgatctataatcaaatcatcgttggaattcctgccaccatggctcttggttgaaagaccggtcttgtccctgttgttctatcatccagaatgataactcgttatcaagagtcgatctgcatgccttggtggtttcctactactctatgatacgaaaatgttgagtttcaagccctcctacaccggaaatcactgctgactggaagatcatttcccccagggccgctcgtgaggtcgtcacctcggtcccacaaagattccgaataggcgcacggtacgggtacgggtacgggccgggcccgtcacaagcaaaaccaggcacatccagcaaccaatcaacaagacgtcgctagcattttacgttgcgtcaaaacagaaagacaaccactagactcagtctacatctccaacaatacccaatggccttgacactcgagttcggcagaaacttgcgacattagatcaagctaaggtacagacacttttcagatgacacttccacgcgagaccttagccgtgcagtgggactttgcaatcatatcaagtgatctttccaagacagtcaaaccgttggtgtggtgtattatagggtcaaggtacgtgtcgtgtctctttcgctgggattacttgaaatattccaaaagatactaaactatgtttacattagattctctatcgaaaaaccgaggatccttcagaccatcgccagctcttacagcaaatatgcggcaatttgtctcacccgccacggaacgaggtacaacctgtcggctcgcccttaatcgtttcaatcctctttagtagcggatcattcagatgaggagagtctgggagctttggaaggtttctacaaatgacgaatgatatttgctgcgagaataagaagagagcaaaaaacgattaacgattcaaatggacaagactcattctcaacactaaagatcgatcgctatctgcaactaatggagtgatttgtctactctatgggttggcgctcatccaaccaaggtgaccggggctcattgataaagacacggactgcaaagaagtcaatgtcgagtatcatccgactcatatatcacgagctttgtcctggatttgggtctagagcatgtttctcctacagtgactgacatattttgctacagatatttctatatttgcttccttgacaatttatatatagagccatgattatataaactaaaataaacattatattgaagaggaacatgcacgatgggcagccttgtcatgcaggcaagacgagaacgacacaacaacaccaagcatccagggcggtcagctagcaagcatagcgaccacatagatcacaccatagtatacgatctcctaatgcacaagcatctcgcaactttcttctcatttccggggtgatgaactgactagactacctgctctctgagactctacttagcaaccgggctctcgcttttctctgcttgaaggataaggccactaagtagggattccgattccctcactgcaatatattgttaggattaatggatcctccggtatgctccggtatactgatctgcatactccgataaaatctactggcctgagaaatcggaacatgaaaacaagtatatatgaacgcgttttaagactactggtcaacctcccggaggaccacatcatagtcggcaaggataataccaccgtgagcagcagcgttccgccgagaccttctggtattgctgataggcttctcagaccatttgtcgagcacaattgaccgcacctcaattgtatgtgcatcgaacgtccgctcatattttatgagggcttttgggcctcttcgaggtctttttgtgtgtcctcgagatctttttttatatctcggatgttctttccttgggtgtcggcccttttctggagatcttggacagcctgtgacggagtcttaagcgtttccagaagggtcgctcactgttcacccatgcttggtgattgtcgttaaacacgaccgggtctggtgacaatgcttatcgcattattgtaactgagtcttcgctcgtaagccttgtcagagtgtgattagcttggccctaggctaattagcgaatatgatactgttactaaaatgaagcgacttgcctcgggtggaaaagctcgctgcaatgcggggatgggatcgactgctgtactgtgcgagatggcggatgaaacgttggaaaatctcttgaattgcgtagagaggaaaaggaaactatccaggtgctgggactaaatagttgttgggagcggagaggtcacatgacctcgaacagatacaatcgggctgagaggatcacgggtagtggatttgtttattggggatttccgtcctttcttctgacatttcggcattttagctgatttctgactcagattgccattagccgtgtaatcaatgatgtgacgtgggtgtacgataaaaatagctttaagatgtgggtacgtctagttgatgtgagttcatcgtcaatagatgctcgataaaccacaactgactagaatatgattgaactaggtcccgagcgtgaggtaatgccaccgcttctctcgccaggcgaccgaagacaatcatctaagctcggttcgtccttacttcgccctcataccgccaggtctcttatatctaggcatataaaatcttcctccaccatatcgttagcattaactgacgtcgtttcgaccgctatacgaactgagatcaaacggctcgctggagattcataccaggtatgtcagtctacagaccctcagatctgccatatgatcggaaaagaagataagtaggtacgtggtactattactactggttcgaatggagtatagctaaccatatttagataggtaacctttggttaaccgcgagcctaatcgacttccaacttgatatcgggacttaagtaagatactgttggttagcatgcgataatagtaaattgcgttgatttagtgaaattaacagcatgaaaaatatcatgaatgaacataatctttatctaccagatccagtgtggttatatttactagtaggttttatccgaaatacaaaggtctgaagaaccccggtgcaatctcatacattgtttcattcgctcaaagcttagacttcttgccagtcacgttgggtacatcatccccggagagcaagaagtccggataagacaaactcccaccggaagcaccgcctgcagacatgcgccagtttgcaccatcgactgtttatgtgtcagttcgcaacattcataatgtccttttgttatttgacaactcaccgacaagtgtttgaccagtgacatagctaccagtgtctgaaaagagatacacggtggcatcagcaatgtcgcggacatgaccaaagcggccgagtggctgggccttggtgtaggcctccagggcatctgatggcagcagacgttccaagccctagtgaatggtaagtcaatcaatttttgacacagtaatggcactgttgagacttatactaacctcggtctgtgcaatagggcccggcgcaatgatgttcgacgtcattccccgaggaccatattcgatggcaacactgtgcgacaacgcatcgataccggccttggcaacggatacatgcgtctggaaaggcataccccgatagtgaatggtagcactgacgaagataattcttccgccagttccaatcggtgatggttgaactggggggttgtcagtgccaatggttaacatatggtgggattcactggacggtgccctcacgagtctttgtatccattctgtgcttggttgccgactcccttagatacggaagagttgccttgagggtattgtaagagcccaagacatcaatatccatgactgacttgaaagcattgaccgagagttgctcgatggaggcgaggaagttaccagcggctccagcactgtcagatactatcagtatgagaatcgaagacacggtcaagttaatatatcgacgtacatgacaaaatcaatgcctccaagttccttgacacaacgctcaactgctttctgcaaatcctcgaacttgcgcacgtccacggaaccgatcccaatcaccttggcaccgggtcggactgtcgcgatgtccttagcgacgcgctcggtcttctctacattgcggccaatgatgcaggcgttggcaccgaggtgtactaaggcccggacttgggcactgcagatagtgccggcgccacctgtgcagaagacgactttgtttgctgggtaagggagttagtgtgggttgtgcggtagcgatggattcggagagcctaccgaagatcccatccttccaggaatcactcaaatattccgtcttgggcagcggcattcttgttactatgtatgtccctggataaattagtttaaagattgtgggggagttgggggaatgttcaggaggtgatttggtgatacccgtttccccacagttacctcggcttcacagttttatgcataaaagattagtgatacaaaaatacaaagctctacaagaattgttgtttaaaccgaagcagttgacaccttgcttgatgaaatgtatgctgagaagacatatttagttcacattccgtgtacatatcttgtctgcctcatcctctagagattcaaggcgcttcatagacagaaatggcacatttccgtgcattgcattgttagtcagcagccacgtgccgtgatgatataagatttaagattcagcctccatctttcagcatcacactagttatggtatagagatgaagttgacgtagtggatgaataatgaacgtgacgattgattgcataattagtgagtactcccccgtcttcgatattcttcttatcacctcattgattatatactttgtcctctactgtccggctgcatccgagatacatgagcatggtataccctagcgaaccaattgtttcaccgttggttggctcaccatttatgcctgtaccacagcaaaataaacagttgtgataattaattgacagtatccagtatataatttatttcctatactagaaggagttccaagtggcagaggttagcttatgtaggagtagacgtcgatctacatctaatatacgactgcctagatagcctagatagaatcttatataaaaaaaagtaaacgctagacaagacttatatcttcactgctttttactgtaataacaacatatagattgccctcattgcgatgaagaacaaccgttctctgattggctgtcacgtaggcggaccgcgacgtcaccgaaaaagaaccacctcttatttgcattgttgacgtgaatcatcgactcgactcgactcatttcagattctgttatatttgccaaatacagctctgagccaagcaattgcctttgttttctgcagtatggcatgccccatcagcgttagcaagtttgttggcactgtctccctcggtcttcttaccgtacgtcaatttcatctatcgcatcataaatacgctctacaaagactaacaacatgtttcgaatctacagggcctctcttactccacatcagccatcacaatcccagctctgcagctccttccaacagcgacaaccgccgcccgctctctgaacgaagtgaagcgcctaacccgccgatatgccctccggctctccttcttgaccaatacctgcttctgtttcgcatggtgcctctcatctccacgccgccgacacccatatatgatttggctatgtgcattctctacaatcggggcccacggtgttgatttctggttccaccgtcacctcggcttcaaaaactgggtgtcggctgtgatccgcgatgtttcccacttctctctgatccgggactcaaatacaagcaaggatgaagaccttgttgtggttgaggccgaggacgacgtgaacggcgaaaccgttcagcgcgagatggaccgggagcgccggctcaaccaagcgcgcacttggttgtctggtattgcactttcgatcggcattgttggtctttggggtgacaagaggtgatttttcttctctttcttctggccacgatggtctttcctcatgatgaacactagttgtggttccatatctattttctaggaaacccctttcgttactgtttctttgatcacgtctaatctgttttacgcctgatacctttcgttccgcccctcttttctcttgcgtatcttttctgtacatcgatgggaaccgctaggaatggagtatcttctgaacttgaattcggcgtatctgagccatatctacagaatcgctaatccgaccacccaagctaaagcctatcatctctcatatgagcctcaacttgactaaaattcgtgggaagttcaaagggagggagaggctgatatggaaattgacattacaatttctttatacaacaatgtaaaatgcagatcggcataagtgaatgtcaagacaatcactccatatagacaaacaagtattacgatctcaagtagatggcgctagactcacatgcaaatcatccttatcctccctttcttaatagtacctaaatccctagataactaaatatttatagccatagtaggcaagtcgaaagtgaacgataaataacagtaatatttgactgtggggcacgcagataacatgtccagaaatataggagataggaagaagaaataagcacagaacataaagtgaacagagtgaaaccagagtgaaaccagagtgaaaccagagtgagggcatgatgagggtaaagtgagagtcaaaggagccgttctcacattaatatatacgttgtacttaggaggggtatattagggtcatattgttataggagcataatgcagcgagatagattatagctaaagagtactaatatcaactctaatttttctaattacgaactacgtatagctataaataccgtcttctccctttcttctttctcttctcttctctcttcctacaatcccctccgtctctgcaacatcttcgccaactggtgctatatactagtaccgtctgtgaactcatatccttcttacttaccactcgtactctactaacatacatgggtataaatagtcacttcttcccttctaccttccacctttcttcttccaccctccatcttccatcttccagtttttgccctccaacatgacgactgaacgtggcaaaccccagtttgtcaggtatctattaacctggatgtggagggtaagaaaaaggccctccaagactgcaaggaaaagctagcgaaggactcgaaagccagaaaccaggctcccacgggcaggcattcgacccccacccgcagcagctcgacaagggaaaagaacgtggcccgagatcgctcccccttgaggatcgcgaatgtgatgaccttagccccgatgtctatgattctactggtattccctctctccgtccgcgaatcgtccctcgatcgattcgctggggaccgtgacacgctaacttccgctcgcgccgggacgatactagatcattgacgagtcaaaaaccatcacgggctaggtcacacatggatacggccacgggacaagagcttgctgggacgttgcaggcagaggtgtgcgacaaaatagtagcggtgcaagaagcatcagctactacccccactatcgctccccagcaagtggagatcaatgaccttagccccgacgttgatgattcccccagcattccttctatcccgaatcgtccctcgatcgattcgccgaggatggtcacgatacactagctcccgtgtgtgccgtgaggatgttatatcattggacagtcacaaatcatctacaaatatatttgatcactagttacatactccgtaattatgccatgtacccctattgtctgactagctatgattaatatcgattagcaagaatatccagggacctagaactaaatcagggcttaagagtcatagccagaccaatgatctgaagaaataaaattaatcccaatacgctaaggagaatggcggagtcgtcggaaatgagccccttggcgcaaaaagaataaaaaggacatggcagtgcagcttgtgttgctgtgaaatagaaaataaattcagatcaaatctataagcttgagaatcatgggcaacttcaccatcgtcaaaaggccaaatctacacgccaggcttggcaatcgtcgatgcgccacaacccaacacgcccctcggaggaggcaagtcaatccgccaaaaatctatcaactcctaactaatttcttagacaacctgcaagtcgcaatcgacgtgtccggcaatggccaattaccatggccggcatcaactcaacccgactcatcgacccacttccacaacatcacactctttttaacatccgagtcgcacaactttaccatctctaacggcacaaagcccgcgtctaacacaagctatatcggtcccattttggacctggagccctcatccacagtcaaacatgtgaattggatttggcccgaatgcctcgtgggagacggctctggctcaaaggactcggcgcgcggggcatacaatatctctatgcaccaatctttccgctggaatgggaccgattattatactctctttgacctgccgatctctgtcaccaacagtatacccaagagtgacgatcggatcgactgcgatctactggaaaacaagcttcttagcgcgacggagatcggcgagagctcggattcgctacctgggcagccgtggattgagggcagagttagcacgacagtatcgagccccgaggcgactcagacagggtcgggtaatcggtgtcattcgggattcaggagaatagctggcattgcgattgccgcgacggctattttacatttcttggtttgaggttcctggatatcatcgggttcatctctattaattatcaattttagcattgtttttgtctttatatcagtacagaaacaaccggcttacttccacgtgcgaccaactatagtgtagattcaaatatggctgtcacaattcgtctattaccgaccaccgaattctactccttctgttcatgatcgtcgtcggtatttctgctttcggaagtatacattctcatgttgattttggaccttggggatatcccttgattgcctagctctctctcccagcaaagtttaatatctccgatcaagggttccttccacatctctagtcaagtatgtcaagaagattagatcgcgcacaccggaattgacaccaacattgacaccaatcttctttccatgccgattttgtccgcctcccgacgagtcctccggtaccgcatcgcccgagccctgctcataatcttcgcaatatggaatcttgccgagatacatctgattcaacaccgaattcacgaagtagatcacgctatcccccgacaccggccgcaaaagcaagaacgaatatatattgcaagcatcaattggaacaatgagctcgtattacgcagtcactggatcaaggcactcacacagctggtcatgaggcttggtccggaaaatgtattcatcagcatctacgaaagcgggagctatgataacacgaaaggcgcgttgagagaactagattgggaactcgagcggatgcgggtaccacgaaatatcactttgtcgcctgtcacacatgaagatgaactagccgcaccggcgaggggtgaaggctggattcacacttccaatgggaagaaacaactcagacgagtgccgtatctggcgcggacacggaacttaagcttgctgcctctgcgagatctcgcacgacagggtatcacatttgataaagttctgtttctgaatgatgttgtcttcacggttcgtttcaatcgtcctatcttctgtggaatgtttattctaatgaaagccctcttctgtgattagccgaacgacgttcttgaactcctatatactaataacggcgaatacggcgctgcttgctcgttggatttctctaagcctccgaattattatgacacatttgctctccgggatagcgagggccatgaacccatcatgcagacatggccctatttcagctctgcggtatcgcgacacgccgtgaaaaaattgtctcctgttcctgtaacgagttgttggaatggcatgggtgtgtggacctccactctaggagagttgcatgagctaacgtatatctagtggcaatgcccgcaagtccattcatcgacagcccaccacttcgtttccgaggcatccctgattcactggcgagctatcatcttgaaggctcggaatgctgtctcattcatacagacaacccactatcagtggaaatgggtgtttatttgaaccctttggtgagggttgggtatagcggtgccgcatatacagctatgcatccggtgatgaactggctctctgcgaaagcgattctacaagggttgtgggtcaatcgactgcgccgtttgggtgtcacttcatggctgaaagaagaagtagttcgaaggcggttgaacgcctggagagctttgagtactaggaatgaagaacgtggggagatttgcatcatcaatgagatgcaaattctgcatcgatacgggtgggcccatgtgtgaagtagagccagtggcacatcgcttgtatatatcatttagtctcatgctgccgtcctaggactatagccaggcgcttataatatgctttatatcttcacctcgcgtgaaatatatacttcgggaataaaaagaaaaaatacacagttttaagattaagttctgcagcagcttgatctacgatgcatatagatcggctactgatattcaatcgcactccatgaatatattgtacaccatcaggaaaatacgaacctcagcatccaatgcattcgactttagcctaatcttcaattcccgtcttttcccaattaattttttacacccccgaggccggcgcaaagcgagcgattatgtaaccccgagccgcctgggactgtatcaaaagcaaaaacccccacttaccctccataaaccacccaaagccccaataacacataatggcaacaatccaaatcctagacggaggccttgggacctccctaggcgatctatacaacatcaaattcgactcgacaacaaccccactctgggcctcacacctgctagtgagcgacccagcaacgctgcaagcatgccaacgcgacttcggcgttgccggagtagacgttcttctaacagccacctaccaagtctccactgaaggatttgcgcggaccaaaaccgcccaattcccagacgggattccgcgcagcgcagtagggcccttcctacagaaagccgtggacatcgccgagcaagcgaaggtgcgcgagaacgccagtgtcgcgctcagccttggcccttacggcgcgtgcatggtccccggccaggagtatagcggtgcctacgacgccgcgcatgactccgaggagtcgttgtatttgtggcacttggatcggctgcggatgtttgctgaggcagagggggagcttgtgtcgcgcgtgcggtatgttgcatttgagacattgccgcggcttgatgagattcgtgctgtgagaagggcgattcaggattctgctttcgatgtgccgttttggatttcttgtgttttcccgcgcgaggatgatctcttgccggatgggagttcggtggggcaggttgtgcgcgctgcgattgcgcctttggagggtggggctgttccttgggggattgggattaattgtactaagatgcataagctggctgggcttgttgatttgtttgggcgcgctgttgcggagtgtgttgcggacgggcaggtatctgatgtgccgagtttggttttgtatcctgatgggacgaatggggaggtgtacaatactacgacgcaggtttgggagagacctgatggattgcgtgatagtgtgagtgctgacgtgagtactactctcgggagtcgggtgggaagattgtggattatgctgacgtgaatttagcgatcttgggaggtgcagttggcccaggtggtcaatgaagcctacgaaaagggctatttcaattcgttccttgtgggtgggtgttgcaaagcttctcaccacgatatcaagaaacttggagagcaattcaagactcaatagggattatgatcacgttacgagtgaagtttggaatgaaagctgaatagaataagacattataaatcggtcatgttgaattgccggctctatatggggatatttatacattatacaagtcatttaaaagagccaatcggtaaacttcgtcaacgcattgcgattggggttttcaacatgcgtgatctccccatctacaagacggcccgaccataggtcgatactggcggcacgctcaaactacattcgacatgttagcaactcttcattaagaaatagaaagaataagagggctgaactaaccttggtgcgacgccagatcttccagcaaatgatggggaaaatgaagatagggataccgatgtacgacgcaataaagtccgacgtattccagttgcccttcaagaagacggggaaaccagcaaccaaagtgatgatgatggaaccgatgaagcccacccacgcggcataaggttgcaaaggtgcttgccatgggagtgtgtctcggctcacaccttgtttcttcatcgcagcaaagaaacggatatagcacaagcaaagggttgcccaagcaatcaaaccggcaatggtgctcaggttcaaaagccaggtgaaagcctgtgctgcaccaccggtgccgagactcaggtacgccagcggaccaaagagccaggcggcaaaaacggcatagtatggcacgccagacttgttcacgcgcgcgaagatctggggcagttgcttgtctgtagtcatggcgacaatcatgcgcgatccgacccagcagtatgagttaccggcggaccacgcggcgatgagaatgcatgcatttacgatagagggcagagccttgatgccggcgttagtgatggcaatgacgaagggcgagctgttcgcgtttccggtgccagagacaaggccttgtgctcttggatccacgatcataccgatgagaagtgctccgagaatgtagaagatgccaatgcggtaagtgacacggcgggcggccttggggatggcacggtggggatcaaccgattcggatgcggtaatgacgacagtctcgacgccaatgaagctgaacgaggcgttgaccaacgaagacaggaagcccaggaagtgacctgtcggaccggtgataccgttgtagtctgtccacggtccagggtgatgccagtagcggaatccaatggcgccgcctttgggagcaccacctgcagtaatgacaatggagacaacaaccaagccaaggaaacagaggaccttgacggcacctccgaagacttcggtttcaccatagaatcgcacactcatcaaattgatagccaaaatgagtaccaatccaactgtgatcaccacggcaggcgtgagatccgtccaatatgagacaataaccgcggccgcggagacttctgaggcgatggcgatcgtgtaacagtatccgtatgaaatagcgagggagaaaccaacagccgggtcgatgaatcgagtcgcccagtgagggaaggatccagcagtcgggaaaagcgttgcgagttcggctatactttgcatcacacaccacaagactcctcccacaataatataggcgagcagcaaaccagccgggccagctttggcgtaggccgcaccagttcccacgaataaacctgtgccgataccaccgcagaaaccaatcatggtaacctggtaattgcgcaggcgtcgctgcaggggcgcacgaccaccgacattgagctcaaactcggccttgggattgacatcgtagtcttcaaaatctgcgccgggcgccgactggacgttctcgttgtcgtagccggacttctccatgttgtgtgtagtgccgatcatctaggctaggtctgccttagtagatcttaccccggagacctgaggagtgaccgaaatgcttagatgggagacagcttttttttttccgacttattattcagtctcggtccaagcacgacatcgggacttctattgacgccaaattgttctccacagtggggagactcattggactgcgtcgctcggagttcggcctctccccacttttttaagcggttgactaactttttcttcattttgccataatcgcaattgaaggcaaatcatggctttgatttgttagtctgatatcgcaaagcttggtggcataggccggcatcgtgggagcattgtggcgagtgaatcaggtatttttgcccccaaggtcccgtgaaaaatggatgcatctggaaaccacgtgctctgccggatagatccccgagaatgtaagctttgcgcctgagatatgaggcaaccttgttattcagccttagtcaccaacatcttcaaccttccaggaaccttccaggaaccttccaaggttggaattggacccttttcgtgggacaaacaatactacggatctcggtgttaggcctgaattacggagtaactgattccgatttccgaggccacgtagccgttcttctcctcgacgccctgcctttttctgatcatccgatttgcgtttaccggtataagtgctattggctcattgagaatcgatcgccggtttttgggggcatttgtatgagacttctttgaagaaaccttataaatttcgatccgccggactagaagtgagcttgcatctgtactttgacgaatatgcctttgtacgcgtatagataaagtatctagctcagccagatcattaagaagcttatcattaagcttcttcttaacccgtatgtatgtagtatccggtagcaaattttgattggtgcataaagaacgagctagctatattggaactagtgcattacctggtcacatgacacatatctaagaccttaggatttaatattgcttcgtttcgctccataatgcaagcaaatgcaaataatgaaaatactttcaaagtctaaaagattttatttagttatgtcagttcgacaggaacatgtacaattatttatgcatcaaatatttatgcacaccagggttccccggatattttaccctaaaacaatatcacatgaccctgaaaaggtcgataccacacaagacctcaacttgttggatgagattcgagatcagttttggcgtttgagttaaagtgttacatatgtaaatatcgaaggctagatccattatcaaaccaccaggtttctgtcaggttacaataatatctcgagaaatcttcgtgcaacatatggtgcaatgaatgggtcggtacggagtagggggcaattaaatagcggatcctctacggagtactccgtactacattttgggttttttggcctcgcctctattcaccctattttgtactccgtacggaggatccccttaggttcgttcggcatagtgatgtcgtatgttcgagaatatatggtatggtttgagatgcgaggggaaaaccagcaatgacacttccactcgtcactgtgtcgtatggtcaactttttcagggcccattgccggatcaaccgtgcgataggagtctaagaaattatcgtatggtccactgacagcagcgatatgcaaaggcgaagcgactccgccgaggggtatccttagactagcaccgaccgttaaccactatatcttacagctgcatcctcacaaatcagacattgcaacttctcatccgcaattgagaaccaaatcttcgctaagcccgaccgaatccccgtcctggtctatggcatctgacccgaccaggttaaagcctacctcacaaactctcactttcagtctctccccgtggcggaaagactagccatcgccgaggccgtctctctctggaagggactagagtccggcgattcatacatccccccgcccccaagcgtatctcgagtccgatccctggaattcccaagcaccgcgatagcctcctctgtaccgtcgcgtctaccgatggtgtcgcccgaagcggccagaaagttgccggtctaactagccacgggatacgtactaacatcgtccgcgcgcagcaagaccgactcccgaataaaattctccaggcatatatagacgagggcatccagcgctagacaaggagactggcttgaagtggctgtatgacgggctaactcaaaagtcgagtttgtacaagccatttctacgagacatttcgataattaatgattgaccagtatgctgtccatggactgagcgaccaccgcgaaaattcatggaccgcagctaatgggataaaatagctgcatgatatatgccccacactagaatcatttcctggggttgtagtttacccacggcgagaaacttccatgagccatcatcccagcagaaactatctgagcaactagtctataacttataggaaatgagatcgtcaacgtaactcaactgacctaacaggaaaacaagaattagcaccagcaaagcaaagacaacaagcaaagtgtaagcagatagttcacggctgggtaaggataattctcttacctggtccaattacgatttgttgacaaagtctagtcttccatgaacatgtaaagtccaatctgttggttgattgatgggtagcgctataatataattaccaacgactgtgcttccttataagtatggctggactcttactcaatcctttggcattatctaagtagctttgcagttcaatgagccgtgaatctagctctggtgtccctatgaagatcgctccgcaacttggaagtatgatgctgcgaaggtccgtagtaggggtttcttgtgctgagtcggcataaagcaggacctaattatggtgaatgataactctcttatgtagaatggtgaaacttacgctgctaactatagttcccccgagactatgtgcaataaatataatcggacaattggctgtccgcgttgaacaagacttcatcgtcctcacaggagaagtcgtcacatatttcgatccaagcggagcatagtgatgatcaaggctgatatcattggtgcaacctgggtactcttattagtctcccactcaataatagggctgcatgtccgacctcctttcctctcctgcattacgcatgcctaattcggcagaggcgttcgatagcgccagacgaacctaatattaaacactccatagtcacactcttaatgttaatcggcctatggactgaaacaagctgcctatgccaagacttccatttcgtccggatcgcggacgtccgcgcccacacactgccaagcgccaagtttccatcataattcccagcataagagctaatgcaggattcaatgccgatccacgtcggccatcacatgggagaatctcaatgttaagcttggaaacagtttattattaaacattccgatcaataacgccgatcattcgttgtcttccgtcttgggacggggtaaaattctattcagctgtcccctcattctctcccctttcattgcaaggaatgcccaattactatatctatcccttgacaattttaccttcattctcccaataatcttatctgcttgcatgttcatggaatgactgatatcgaactctcccagcgagatgccctggaggacgagtccccgctcacctccaacggtgaggggtcttctgcgcccgtgaagccagcgcaggctccaaaggccggcaggaagctgccaggatggctggatcacttcaatgcccgcgatatgaaggtgctgttccgttgcacgttggctgcatgggtcgcgtcgcttttgatcgtgatcactccgtccttaagcgtcattggtactgcgactttctttgcaacgtgagcgcatctatattttactctcggtatcaattgctaatcctatcgcgatcagtctagtactctttatggtgcctccgaccggcattgttttcattttccttttaggaactctgaccgttatcattggtatggctttgggctgggcctggggtgtcatcactatgaaggctgcgatggcagcgagaccagcagccgagacccaggccaaccttcaatccctaggacaggccgcatacagccaggccaattccaccggacaggccgtggcagaagtccagaaggagcttatctataacggctggatgcttgacgctcgtgtaacagttgtctactattgcctaatctgtctgttcatctatttaatcgtgagagacttcttgacccgtgcataatgatcgcgacactgaccctttcgcgcagtcccgtcttcgggctaagaaccccaaactcattctgttacagattctcggaatcatcatcatcgatgttactctgactattggcccgatgcttccatatttcagcggtactgtccctaaggtcttgatcgagcctgccgctattggaattgggttgggcctggtctcccattttatcttcttccctcgatctacctcccacgtcgtgcttgatggcatggaggggctggtgcggttactcaaagggcctgtggacgtcacggagaacactcttctgaaaggccaagtcttggatatggcagatcttcaaagaatcaaagggcaaaccattgctgcttacaggaatctcaagccggccatggcctttctgccgttggacttctctgtcggttggtggggtgctgacgacatcaaaagcatgaagaaaccaattcgccaggctttggtgagtagtctgtctcttcttgaagttcacatcgcccgcatcggcggagaagccaagttcaaaaagctgcaccagctcaccgtggatcgagactccgactctgattcccaagcgaatggaaatgagaaaaaacgcccacgcgaggttggcatgcgccaaatgatggagggtgttaatttggtacaagcaatgcgaagcccggaacatgaatctatgctatcggaaactgtcgaggtattgcgcaagtccagcaaggatatcctcccggcgtgtcaggaagctgttgagatcattgcagaatccattaacacggccaacaagcgttggttcggtcgcccttccaaagaacgtctcaatcagttgcacgagcgcagtcagactgtacttcagaatcttcaggccctgcgcacatcgttcgcgtcggaaaccaccgaccgtctgattcaaacacatgcggagattttcgatgaaaaaggcatgctcaaggcccttgacaaaacttcaatgcccagagttaggggtatcatgatggggatggtcttcgaagagcaggtgctcggcgtcgctgacgggtgggagcgggtcctgcgacaacttgtcgtcctcctaaaggaacgtcagaagatccgtctgtggctacccaagggcttgcgatacgcactcaactgggtatgtcgtaaaaatgccgtggcgcctatacccgcggctgatgacccaatcgtcgaccccgatgtcgcagagacgcagtccaaagcggcacagcttcatcttcgcatgagcagagggtatcgtgtccaccgaggtagcagctttgggcgcgctatcatcggcacatatcattggtttatcaaccctgaaggtctttatgcaatgcgcatggtggctgtcaccatcgcgctcgctatccctgctgcgattccccacactgcgggtttctattaccgtgaaaaaggtatctgggctctcatcatggggcagaccacactggttatatacatggccgacttcaccttctcccttatttgtcgagccattggtactgttgttggtggtgtccttggcttagttgtgtggtacatcggctcaggtcacggcaaaggtaacccgtacggtcttgctgccatcatggctgttgcgctcaccattctcatgtgggcacgtatattcacgtcccctgctttccttcaagctacaatcatggctggtgcgacctacattctggttgtcggttacagtttcgaggatacgtaagtaaatggtaccacattggggaagcaacatggctgacaacttcacaggcacatcccaacttacggcaatcccggatggggatatagtgttttctggcgacgacttgtgcttgttcttattggctccgcagcggcactaatcgtgcagctcttccctcgtccgccatctgcgtcgagacacatctgcaagtctctttcaaatgtcatccgctcactgtcggaccactacgcgcttctcttatcctgctggggacaagggcgcgaagagggcctggccgcagagaagctagctctaaatcttgcagagactatcaccgcactggacggtcccatcgccttgctgcgctttgaattttcgagctcgccatttgacagcgatcgtctcggtcaggtcaaagcactttgtcaagaactcaaccagaacattgctcgcctactttacctatctgcttcgctgccggagcacctacagactcgcctcgctcggcaagtcggtctccttgatcatcacaatatcggcgacatcatggctgttctcggtgtggttgaacaatcactcaagacgggtgaccccctacccgagatgctgccaacgccactgctcaaccgttgccacgattactggaagtcgcaccagacagatattatcctgagcaaggagttgatccgcgacgagaactaccgccgattctgcgttgccatcagcgcatacctcaagttcctggctgccgtggatgacctagtgctcgtgatgaagggcacattgggtgagtcgcacatcgtcagccgcgacctgctccacgaaccgaatgtataagagagcaaatttatattgtaattagagtgttctatcaggatcgttgacatatataattgtgcatatagcgatgtgtcatcaaaattggatcccctcacgttcctccgcacggccggttttctccaattttttcttcttcccctaattcccaacccattctacggcctttgctttgaatgaacgtcattcaatattttgtttttttcccttttgatctcctgtatggacgattaccaataattataatattcaattccatctgcgggtctcgtccatggcccctccacgtcttgcccgtcttccccggtggatcagccactggcttggctatcgcccagagcccgtgaagccactctctaaatacgaagtcgctctatggtcgttcataatctcattctgcggtctatcggtcttacaagcaattttcaactactccgactacttcaaagagcgcaatgtaccgggtatagtcgcatcctatgtacgtgtcaatagccaaatcgcattcccaaatatcgacattgactcacataaaaccagggtgcatccgccgtcctcgtcttcggcgcaattgaaagccccctagcgcaaccgcgcgctctagtcttcggccacttctttagcgccctgaccggcctctgcgttaccaagttgtttagcctcatgccggacaaagtgcggttcgagtccctgcgctggctagccgcttcactttcaacggctattgctattgtcgtcatgcagttgacgggtactacccacccgcctgctggcgcgactgctctgctcccagctaccaatgaggagatttggcggctttcttggtactacttgcctgtagtcctgttgtcctcgactatgctcttggtgtgcgcgttgctgttgaataatttgcatcgccggtatccggctttctggatcgcgcctacgccgccgaagccggctgcgcctgttgctccagtggcgccggcgctggcgcctgttgacgtttcgtcggaagaggagaagtcggtgaagagtcctgtatgatgctttaaagagcttctaatacactctggtaatggttgcacggcatatgccgctatctgtttcaaggatgcgagatatatatgatgtatataaaaactcggttgcactactaacatatccgagactacgtaaggaaaagaaattcaacatgactctttcagggtctaacatacctattaactgtattcacaatctcccaagagctactacgtagcaagcccctacctagggctcttcaatattcactcagtttacgactctcgttaggtctgattgcattaggggaagcagcttcgtctctctgtcttctatgtttgggtgcatttatccaattacttgcgtattgatttaggaaaaattttgagaggctactgtgtgggacaagggagagttgacaaggctgtgccaagggtttagctcttgaggtctcttccttactcttttcgtcttacttgattaacactacgtttctacaatttggacataatcaaggaacagctcatggttctatttgactcaactagaaatttaggcaccgcagaaaacagagaaagttgctacaaagcagagaagcaggcaggtatggacactgtcaaaacaaaacagaaatcccgcagaaataagcccccaggcttaatcctcctcgctgctggacgaagtcgtggacgaatagtattcctcctcaggcaaatctggaaggggaggagaaggggtaggttcctcggtaggcaggtagaaatcgcagcactgtcggcatgggcagtcatgcaccttgtagtacaatcgggcccaaatcattcgaagatagttgcgtctttcgtcatcttcttcgaaaagcttgagctcccatcgacgctgctcacgctcaaccatcttggcactctccactgcttcggtgtcctcatcgctcaatccatgcagagtgagacttccaacttgcatagacagcatgccgaacagcttcttgagcaccggatcctcgatggtggtcattagatcggcgttagtagaaagaataacccgtacgctgtcagatatctcttcaatcaagaccatgaggttattgcacctctcttcgaagcaattgccctccttctcggagccttcccgaatcaatgtccacatagacaatgtgtagaagattttgcggaggtaggtttggatttgagggacccatctgcctcctgtctgtccctcggaaagtttgccgagctccacgacgaagccatcgcggttttcctggaagttctcaatggcggcagctttgacgtcggcctgcattatgatgataacagttagagatgaggatgatgtaagctggagatgatagttattgaagatgatggtagtgaagatgcatacctcgagtcgtgggggaattccttttgtactcgagcaatagatcttgtctggcatagcagatttatcggagtacaaagagacaatgggccaagacatgacaatagatctatagagaccctcagccaaaggaataaagcctttggcttcgagatatgagtctcattcaaagcaggatgtgtcattcttttcctttataagcgcgaagaatagacttgaatatatgagccctatacaaaccagaaggggaactcaatcatgacagaattgcggtcgacgaatctatcaaatagaaaaagggggaaattatattagagaccgctgactgtgcatgatactcttagctttagagatatatagctgaagatagaaaaggtcttaggcaatcaatgaatgtaaaagttgtgctatattcaaggtatttatagggttgtagggttgtatgtgatcaaaggagtttgtgtgcgcccgtactctttctcccctttctttgtgcaccactcaaaatagcaatcaaagttgttttgcagacaaactaatatcaaactctcaaaggtccagatatcctgacaaagggcagtcaagtcgggtctttggggacgtttcaacaagaacgtgattgttcggcgcataacaagttcagatttctatgcaaaagaaggctggagttttccacaagctcggtcggctaatctctctttcatgagcacttcatagacatgcgatgcccacgcacagcaaaccttgcgcgtatccttcgggtcgatgatttcctctattccaaacgcgttcgctgttcgcaccgggttcatcagccgcaaatattcttcctccaactcttgataccgttcttccttctttccaaccttctcggcttcacgcagctcatgccgatggccaacttcaattccgccgtccaggggcagcgagccccactgtccagacggccaagcaacctgcataaccggatcacgacaacccaacataataccgcccgctacgccaaacacacgccgcgttaccacgttgaataccggcacggtggtactaaagtaagccttggcgagctcgacgccccaacgcatcgtggctgtgcgctcggcaaccgttccaatagcatagcccgcttcaagaaaacgcgtcagcttgtttcaaaggatgtaggatgaaacaaatcacttacggatgtccaaaaactgcagaataggcagattcatcacatcacacaacttcagcagccgcgttaacttctggctaccagcggcatccagtgcgcctccgttcacttcacagttgacggagataaccccaataggacgaccacctaggcgcgcaagtccaccaattgcagtacgcccccataatgcgccaatctcaaaccaggagtctttatcaactacagaggtgatgatcgaacgagcattatacatgcgtgcttgtcttcgagggatgatactccgcagtgcaacatcttcgcgctcctccgagtcagtgcagggaatagttggtggtgcatcgctcccactgttggggagatagctcagaacgacccgcagctgctcatagcactctgcctcattggcggcaaggttatcgatcgtgccgttcgtacaatgaaccataggcccgcccaggtcttggagctcgagaccttcttcgaatgtggcaccttcaacaaccttcgggcctgcattgaacaatgctccgatgtcagctgccatcactgaaaagtggcaggataccactcttgcagcgccaagcccaatctacaataaaagttagttcagctcatatcaacaaatgtcaaatggtatgtcagataaagcaaaagagaatatcacgaaactcaccgcaggtccaacaacagcccccaaattcggaatccccatattcaactgcttaataacatacggaaaagacgcaacatgagggagataactccacccttccttctgaataatcgtcacgctcccaccgccagaactcccatcaacaagcttaacaaccggcatacgcagcgcaatagcaagcttctctacataaaccgtctttccggtactcgcgccgtccgcatgtccagaccggatactgaaatcatcagccgtgaggaggaccttcctgccgcgaagcagtccagccccttggatgttattactaggcacgaaggagacaggcttctcgcgcatcggcgcggtcttttgccacgtcaccgtgccggaaacggacccgatttcttggaaggtgtttgggtcaaggagttgctcgatgcgctcgcgcacccatagcttgcctgcttgcttttggcgcacgtagcctcggttggtggggtctggctttgcggctattgcgcggagggctgcgagttgacctaggacatctgagtggtctgctgggaggtgggtttctgtggactttggttttggcttggactttcttggttgttctggtggggatatatgggatgagacctgttgtaggcggtccgtggcttggtctttgccagttctcgttgatgggctgtcgttgtcttttgtcatagtgtgtcgattgatacaggatgttgtttttattattattattgtgtagaatcggatacatctcttgtttaaggatttggtctactgaggggctaggcagaccttccgagggccgaggtcacccacgagagctataatatcttctcgaaggaagtacctggtaatgagatattttaagatacttcgattgatctatttgacctatttgaaacatattataactgatttcgttatttgatttacttgggagggacttttgcatacaattaccccggatttccccttccaccccgatgtcatccccgcactcacggcccatcaagagattgttggtcgccaacaggtatgaacttctaaaaaaagttaatgttatattatactcatgtaatatataatagaggagagatcgccgttcgtattctccatgcagcacgagagttaccctcgtcagtcgagacattcgctctctacacatcagacgaccgaccgcattgcgatctaggacgaccacagcatgcaattgaaatcccatcagcatcatcatatctcgacatttcattattggtcgacctggtccaaaaaaactctattgatgccgtgcatcccgggtatggattcctcagcgagagcgccgaattcgcgcatcgcatgtggcacgaagccggggctctcgtcataggacctggatgggaaaacctcgcccggacgggtgataagctgcaggcaaaacagctagcacagcaatgcggtgtccctgtattagaagccatgagtcaacctaccaccaacgtggacgaagcacgtgcgtttgctacgcaggttggtttcccggttatgatcaaggctgttgatggaggaggcggccgcgggattcggctcgttcgcgaggagcatgagctggataatagtattcagagagcgattggcgagtcgccgtctcggactgtctttgttgagaaagctgctgtggacgggtttcatcatattgaaattcagattattggtgatgggacaggccaggtgcgacatctgtgggaaagagattgcagtgctcagcggcggtttcagaaggtggttgaatgcgccccggctttgatgcgggatagagctttggtcggtcgagtgatcgagtctgcgctcaggatggcaagtgaaatccgctatcaatcattaggaacctttgagttcctggtcagtgaacaacgcggggaattctactttttggaggtgaacccgcgtctgcaagtcgagcacaccattacggaatctatcagtgggatagacctggtgcagacgcagcttcttctcgcccagggatacactttacgtgatctgggcctcggcgctgaaattgacccaagtcatcttccgccaaatgccttttcaatccaacttagactgtgtgctgaagacccgagcaacgggttttctctgagcattggcaaagtgactaggtttaccgtgcctagtggcaatggaatccgggtagatacacatgtcaatgtctctgggcccgcactagttgtgggatccaacttcgacaatctgttagccaagataatcgtgactgcgcccacctgggaagcgtccgttagaaaagcccagcgagtcttggctgattcaagggttgacggtctgaagactaatatcagccttctacgagggatcgtggcccattccgatttcatggccggcaaagtcgacacgcaatggcttggactcaacctcgacgcagtactccagcaaggggagatgatatcgaagactattcagggactagatggttcagccggcccttcacagcaagtcagccagaatggactaccagtatctaatcttttgttccgaaaaggagatgcatggtcaatcacgttggaacctctgtcgaaggattcccaatcagacaaagtttcccaccatctgcgcctgtcccgggtactacgcaatgagttcccgactgcattggctgccgaaattgaatatacgactccaacttcggagggcgcaatctcctatcggatgcagctcgaaacaaccacgactgctgcgtcagcattggtgtcctcgtctcatcggcgaggtgatccaaagaatccccaccatattatacttcctctgtcaggcaaattgattgagatcctggtgtcggatggacaggatgtggttgaaaaccaggtcctagctttcgtcaagcagatgaagatggagctcgaagtacgaagccctcgaagtggtcgggtcaaatgggttcatgagatggaagacgaagaggaggatgttgccgagggcatgcttttggtcgagttggagccgaacaatggcaaagtggaagtccggggcaagttgtgattgtaggatataggatagcatctactgagtccctatacagatcaaattcgcgagtcctggttataaccaacgaatcagcttgcagatccacttggttcctcagcatcattggtctagtggtagaattcgtcgttgccatcgacgaggcccgtgttcgattcacggatgatgcacaagaatttatttttgctttttggctctggaatcggttactgaactcaataaagtatgatcgctttttggacgatgataagatgagtttggtatttactttttgcaaatcaaggcaggcggtcaatatgagcggtcacttccccaggtgacgtcaccgcctcggtcttcccatcctcttcctcttcctcttgtctctggcttgacccagggtgtttttcagtatggatgatcttaatctctatgtgctgacatttaactgtgcaagaaacattgtcgatgtcgacgtgttcgcggaccactttttcgacgcactccccgcgtctggtgcggggagctccgcacccgacctgattttcctctcgctacaagagatcgcacccattgcctactcgtttctcggaggatcctacctttcaccctacttcgatggattccgccgtgccgtccagaaagcctcggcacaaaaatggagccaccactatgtgaacttcctcacggaaaatacgggaatgacaggcctgatgcttttcgcgcgcgaggacaccctggccaagatcgcctggagtgacaccgcccacgtcggcttcggggttcaggaaatgggaaacaagggtgctgttggggcacgcctgggatatgttgtcgaaggactcccatccaagaccgtggacctcactttcgtggcagcccatctcgcccccatggaggacttatatgagcaaaggaacatggattggaaaagcatagttgagcgccttgtgttcacgcacgacaccaagagaccggcagagggttcaactgcgaatgaaaataccggccttctcgacgacgctgcagcggcccacgcggagggcagtcgcagggatctcttcgcgcccaacgcctacctattccttgccggagatctcaactaccgcacgtcgaatgtcggaccctcaattcgagagatcgaacatttccctcggcgcaatgtcgacattgataacccgtcgcactattcgcaccttctgaagaacgaccagctcgtgcgcgagatgagctacggcaggaccttccacagcctgtccgaagcgcctatccacttccctcccacgtacaaatactcggacgccgcgcgcgaagctgtccgccggggcttggacaccgacgagcttgaatggaactggtcgactcaccgctggcctagctggtgcgatcgagtcctttaccttgataagccctcgtgggttggtgaggccggaaaggtcaaaccgctcgcttacaacgcactgcctctcttcgcacagtcggatcatcgtcccgtggcgctcgttgtatcggtgccgctactgccctctaacgaatcctcggacaccgagaacatccgagctgtggctccattctctattgatccgagttggaaatccaagcgagacgcggcgcgacgaaaggagattgcggtgggtgcagttgcgtatctgggactaaccagggaaggaaatgggctgctgctcgcgtcgttgctcggtgtcatcggagcgtggttcatccttcgatctatgctggaggtttgagtgacggtatggtgaacggcgctttctcgggactctatttttcctttcttttttcccctctcttaggtattttcatacgaatatcatgcaatgctgcccatcgcccgaaccggcgctggatgaaaagccatgtccctttcgctccgcatagtctccatagttccaaggtttgtaatccgggtgtattccgaggtcgtcagcagcctcaattggatgtctcgtgacgggaaaaacaccccgcattcctcgaatcgatcccatcaagtccgtcagataaactcaagggcccagctcaccggccgcagtcccaattatgtaccatcagacaaggcggcccgtcggtgatttcttagcaacaacctaaactaggaaattactcttttgggcccaagtcacatgaaccgagccgacccgaaacggtcgggatgcgttctgcaagtgtgaaagatggcgctaaggactgaggggcaccgtggcttggattctagacaagcggatgaggtcatgttggggttggtatactccgattatcgctcgtccatttcttgcttatgcgcgaggttcccatgatttggatgggctgggattgtaccctgcaggtactgcatagcctctctcttcgatgtctctggggtctttgtctccctctctcggatactgccgtggctgtcattagtaaggtttccactcttgacctaactctgtaggcacttgggcacctccgtcttccacattgtcacaccggggacttcttttttttttctttgggctgtgtggtctagatgcggagggagtcgtctactgcttttactccaaatgttgccatgtatgttcctcaactgcggaccactattctttgacggtccgcgacatccgggctgcagttgtcctgaaaatactactggctgttatgtaccgggctcttctatacatcccacgtcgtaaaccggtagtagtaaccccgaccattaagaaacgtgcgataacgcatggaacaggccacatgatcgggtcaagtgacccagtgagcttaatttcctgcttctccaaccccaaggctttcaccgcgtgtacaacttacgaaagcccttcaggcatgagaggcggtgtgtccacaacgtgtatagagatcaagacccccggacttctggaatgcaccgcactggatgtgatagcaagccctgcatttggggcggaaatcatctcattttcttacattggagtgtgtctctgggcacaaaaaaaaaaaagaaaagaaaagaaaaagatgggaagaaaaagacggaaagaaaatccccgcccggactccacagcctccacagggatgaaagggagaaaccatacaaatatactccgtccgacccaagtcaaagggctattgaattggattgttatagtgagattcaaagactggaatgtcggccggtcattggcgtgtactgaaatatgagataacgatcatccttagagtacctcccgtactccgtagttgaataggggttggatatactccagtgccaataaacgcaaacagaaattgggcagcaaaaaaaaaaaaaaaaacatgtcattgacagggcagatcaggagaaagtggacagcacagaaggatcggaatgttccatgcaaacttacaaacaggcctgaaggggataaccgaccaaatcccctgagttcggtggagattttcttttccagaacaaaaccagaacgacggcggagtccatagggagagggcccaagagcctaagacccagcattgggaatcggagggggcatcaatttgaaacggcgtctatactgaagacacaactagaagcaatcaaaagaaagtcaaaacgtaatctcccagtacaacatacaacatatatacctcgacggagtacgtacgtcgatacatattaagttccttcatctgttctgaagcttaaaggtttgtttgcattaggctgttgtttcaaaaatctgccctgtcaggtgctccacctgtccctgcaatatacatatgagactgcgagtcatcccgcgattttctgatgcatcgtatcgtcattttgtttttcgatgtatggtggatccttcattggcccccttcatgcaccgaagaccagcattgagccgatcaacccgcatgctcagatcaagggatcaggatcgaccgatctctgcattttagaatctattaaatatgtagcaggtgggataggcctctcacacgccggccctgcggaatggcaggggatcgaatgccacctagggcttggtaatcaaagacggagatgggttagagagagattaacggaataatataaaagggaataatataaaacagtcaatacacgacgtacaaataataaaagacaatatttagaaagaaataataaaataaaaacataaaaaataaaaaacccaaccccagtaaacgaaaatgggaaccctaaaaattctaatccttccttatttaactgcctggaacttggatttgttgcattgttttacttctaagccatctttttgagcctctaatataaagtcatcttctcgatcctctctgtcttcaaatctggtcttctcctctgattgtggctgaatctctatccaacgcaaccttgaaccgccgacgtcatcgtgttgtactacacattctaggccttggtccttattctccgttacatttaatcagtgaccaagacactttttctcttctgtccaaactctcgaagcatccaactcaacgtccttggtcgatcccacattcgatcccaacaaccccggtccaatatcatcaaccatgtactcttgcgcaaactatccccgcgggtgccgaggccgtgtcaaccgacaaggagcaaagtgctctgactgcgtggtatgtgccaaatgatatctgtgtctggtctatgcaaagatcaacgaaagacaaaggaaaacaatccaaactaaccctataccagtctctaaacttgcgccgtccagcttcgccgttcgcccaaccacgcgagtacaagcgcgcacttccctcggaactctttggcgagctctctaaactctccgagcccaagctgcaatgaatgcgaagctcatacatccgggacggtccgaagaacgcctcagcttctagctaggttgcatatcctgccggctgggatgcaccgcgcatgttcgacggccgcttcctttgttctttcttatttgctctccacgtctctcatctgcatcgccgggagtttctttgttatattcggccgtctgcctctactttgatgcctaattgcccggttttctctttgatctcgtctggactctccccacattggctgggctaatgagtgagctctcacgaatatctcctggaaactggagaaccgggcgtggacttcgcgaagatttccactttcactcgcttgggtttgtttcgaggacaaagaacggcccacttttcttttttttttttttgcatggaggatagatcgcttcattttgtttttgcatggatacctacggatatggatctgccactggagggcagtggcgctgatggattgggttctttcaactctccggttgatcgttgatcgctcccttcttttccttgcgcatacgtgtgctttctgctttttatgcccgattttttatgttcttttaactgatgttgactcttttctttgtaaacggtgatgccatacccctctgttttactgctttcatatgaccattcccctagtgctatatacctatttacagcattcatactattatgtcttgacatctatctcttctcgaatatctctctaaacaaatgtacattgtagactcgggcctgaccgcaagattacgtctgtcaacccaacacttgacacccaatcctgacaacgtatcaggtctacatgtacattaccctgagccgcagttccggggctatcaagttctgggcccaaacccaagcctctctctctaacctgtcgcggggacccgacatccggatgatcctcttccctgacatttctcagccgcaacgaatcctccgtctcacatagaaaaccaacatagcccaaaagaaaatccatccaagtctagaatctcgctcctgcactcatcccgtccaactctcggctcaccaactcacacgggaagcgtccttcatcagcccatccattcccctcgtgtcccatcacatcatccccccgaatccgctgcgcaatcccgagtccaacccttgtagcagttacaagatccccgtcacgatctagacctcgctggcccgaatctacagatctgcgcaaagagatgcgcgggtggcatgttttgttcccctcgcccggccagtggccaggggctatgttgcacgcgagattgcgggatacgggatacgggttacgggttacgggttacgggttgcggttacggggttaggcaataatggcatttgtgcgaggctccgtacgacctgcgccgtcgatcgttcgggttgctgtcgatggctcatgtcatgcaggggctagctatccctgtccctgtctgtctatggtgggcgcacacatacctctaacgcaccagctcttgcgggtggtatgtatctgactgacgccgttgcggcccgcggctttggtgatatgactaagttctacactcggccgtaactattggtctggtttttggctttttggcttttttttaccggcgcaggttgtgaaggtcatgtggtgtcccacggggtgcatctagacttagctgggccctggctggcctttttctcggaaaatccgtggtcccgaggggatcgttggctatgatatgtgatatcctatgcttttttttgcgggaaacgtgtcataccttgcagaatccgctcgaggacgggggaaaagggggccgcctactccgtaccgcagaacacagtacggagtacaataggagaatgcagaaaaagagaaccatgtcgatcgcttgtctcagagatggatagtttcccgctctatgtgttttgtccacaaatgaaactattgtctgtacgtgagattattgtgagctagacaatcccccctcgggccaaccacatatccaaatgggcaggagatcaggggtggccaagaaaaagaacaactcaaaaagaagaacgggaaaaaaaagagaaacaccaaatatccactttggtcggattatctgggctccatctgaatgtaaaacaaagcccagtgggatgcactagctacccagcctagtgttagatgtgcttctagccccttctactggccttctacgccgtttctctttttgggctctagcgtcgaaatttcaagccccctttttctctcgcggttttgacttggtattggccgtaattttcctgcgctcagccacattccacagtccacagtagcggatcgatcgctgtttcaggaactgtggggaatttggcacgttccaattccgcgggatgcgttgctcttgagaacgatcccctagctcgtttggaatttcctaagatctgttgatcgctgggggagggataatcggtgtggcgttgcgtttcccgttgacacttgggtaaattctgcatcggcattcgttgatatcgtccctgagacaagggtctcgtcgctgggcactatatttacagatctggcatattatgtctcattcctcaaacttactagaagtaagcacctacctagaagagaagaaaatcctaaaatattacctccgcgaattgcctagattaacactatattaactctcgtctccctaatatcccgacacaatgacaacgtgttgggcagctgccatgtagccaatccgtgtcaagctcagaaaatagattgcctctcgaaaagtctagaaaaaaacaggattcccgtggaaagcaaatcaatgactcgcgagcttgtctatatccaacaatcaagccactgtggatttcgtccatagatgggtgttgttgcatgtggcaatatccactgtgccctaagcgttttcgaagaccctcttattcgacacagaagtgtcaaaccgtcaaaacaggccgtcgtggagtgcccgatcggatctacaaacatatattgcctctcggcatctggctgccaattggttattagttccggtctggaattccccttcgggattggagtgataagcacggaacggctgggacggcaagttacggctgtctttacagtgaacgcgaccgcctagctcaccgccgggttttcatcggcctttatgaattttgaaatgagatctagttttgacgttacttttatatgaactagatcgaaagcagacaagtcgtcgtatagtgtgaataaagaggcaaaggggcaaaggtcaaaggggcagactataggaaatcaagtatataagcaataggaattcgattattgcggattaaactacggagtacatattccgtgtagttatacatatgaactgtatgtgtataactcagatttgtgtaagtgtatataaatactgcgggcaaaatggttaccggcggtaaaatctgccgtacggcaagtgtttggtccttgagagccgctttggggcgtaaatcccttaatttccgttcaaggtctggcgctttacgcggataccggcaccttgcggaagaatttgcgatcaatatattaattttgccgacagagacaatcaatatattggttcttacggagtagttatgttgtgcttgacattttatatcttaggctttcttagtggatcattgttcggggctctcggggggtggaggttaaggtctaagggggcctcgattcaattcatgctccaatagtccgtacggcattttatatgtttccaagtgtaatcatctacacgttcaaaatttgcccgcacacccactgtgcggtcttcgtgtggagtgtccaatctcgttcgtcctccagagtttcggtatcgcttgctttgttgccatatcctgcgtgacaggcctttccaagtgcttcgaaaacaacaacttggtctctcatatgtttatctaaacaggctcttctgacggtggaatcaggtttcttgtctgcattggcatttggactctcgtttgagatttcctcaatgaatccttccacacatcggcggactaaatctgcagccccagaaaatgcagcctcggtttgagactcgtgcctatgatcatgagctggttgttgcttttgtttccccttgttcttgggcttgtgcaggcgatcgcctcctatattgccaagaatatcgtggcctattctgaaacctgaagaggtatgggccacaagaaggatgtatacgtggctgcggtgatttgtggcttccgatgtgtgtattttgataggaactggtgtatctttggatgatattttgctgagcatatcttcttcacatggaggcgtagagcttttggcaaatatagatggatccagctttctcgtttcacggcgaagcaggcgtcgagtgccttgttcgataaactgtcgaagagtgctccccgtgccttctgtgttgctgtttagggtgggttgatcaggtgctagcactgtgatatcaatttgcgtgactttgccgcgttcgtgatccatcaagttaattcgtgggaagctggatagaggctcgggtgacttcttgttttgattttcgtcatctttcaatcgagatccaagtggatgtatgagaaaagtgacctctcccaggtcaaccggccccgttgtccagccgcgcttatgaagaataacggacaggggaggaagtccgagtttggcgaaattgggcacaataacttgcgctgcatagtcatatgatggagagaaggtagcgttggttccaccagttatgttcactttcacaaagggtgtcgccgcctgcgatccaacatgaagtagatacgggtagagtgcctggaagacgagaaagatggcaccggcagttgagagcttgatgtcgtattcagacttcacactgacttgtgacaagtccaggagcggaccacttttcgatctggttgactgtgggcagaagctcaaggactgggagccaacctcgcctcccgagacttcgctgccgctaatctcggccaacagcttcactgctgcggcatgagatctcttgagccccttctttccatctctatttccgcgaacatgatcaatgctgactggacgaccagtcaatgcagacagcccgatggcaatgcgaaccagctgcccgccgccttccagagtttggccgttcaggtgaacgtggcttaatttggacgaaatagatcgcgaggccgccatttcaggagattttatctttgacagggatacttcaaatccttgaaatccctcgaaattccgggcgaaaaccaattattatattaattttgaccagagtcaggtcgtgaggctgcgtcttggcgtgagtcacttcggggctgggtaatatttattggcgccacaggcgtttttagcgcttagcgaaggcttagctctagatagaatattggaagggaaatcgagactcacctggggaagaggttgttggtttgttgtaaaatggaggaaatggaggaagtgaaaatggaagtcgccatggagttcgcaccttccctactgtgatgtgatgcagtactttcctctcatgatttcgcatctcttcaatcttccctctccaaatttcctcttctctgaatacctttttctctcaatactggctgtagctatatactctgcagacattttgtaacatgttttcttctacatccaatacacgcaacctaagaaggtccatgtccacccgctcaatacgaaaaccgcgacgactagccccagaaatccctgatgcggctgtgcagcatgcagccgcagcagctgcagcttcgcgtgcaatgcgctctagtcaaggctcgtctcaggactcgaaaagctcatacgaacgactaggtggtccaggaaattttgccatccctcgaaggcgtcacggatcaagccttcggagcactgatgatggctcgtccgtcggccagggcgactttcctaaagctccaaatccccgtcagtccaaagaactgaccggcgtatctgctcgagcgcattgcttcgatgaccctgcggcccttcccccaatcacagaactcgacggacttgacggacgagacagctcagtcccctcttcatatcgccgattgcgcaaggccaagtcgatgttctcgaccagccagcgaacttcacagaccccatatggagtgcctacccttccttgcagtgatccccttgatcccgagcgcagtcctggattccagctgccacgaacaatgagacgatccatgtcttttcttcggggaagttatcaatccaatcaagtcgctccaacttctaagggtcatgatgcggctattcagcttgctcgtagccaatttgcccaggatcccgacgctggaggtgttcagactcgccggccatctttcttgcgtcttagcaagaaagagcataggccatttcgaaagtcgttccgggccacaagtgaaagtggcgtcgataccgggcgttctcttaaatctcggtctttttccaattccatcaaaaacaaattcaaacgtgtgtttgggttttccaggctcgatcaacaacctggtagcccaaatgcgtccatggtaatcccggctagaaaaagcattgaaggattctccccaaacaaggtttcagccattggggatggcactgattccaactatttccggccaatgccccagtctcccagccaagagagtctctgcacttccaagtcgcgcgtcaccagttgggctgattcaaccacgccgaacacagttacaactcggaagctaggacatcgccaatctctctctttgattagagaggacggattgaatcagcaaataccacggacgcctacaatggatgatacggaaaatcaatctcctctagctgcgagagcaaaccctcatcgaattagcattgttgacagtcaagatttgtacactgcgttgatgaaacaaatgggccagaattccctgcctaattccaatgaggatatggtcttcggcaatgtgtcgcagcatcgtgtgatcccagagcgggtgaattcggtctactcccaacatggccgacgcagtatccgtcatgtcccaagccaagaatcctcgacctcgcccggttcattcgcaaccgcgcgtggtggtgatcaatccagtccacgaaagtatcctcgctcagttaggtcgatgcaagtttctcggggcatgccgtctcagatgaaagatcaacatatgactgctgtttcggacgcaaagtctccgcaatcagcgtacgctttttgcgaggaatcggatgatgataatggtagcgttattgtttctcggcttcgggcctcgacaagggatattgtttccccaagtgtctattcccggaccaccagtggtaataccccaacaagaactgacaataccgacatcggcgtccatgatgaaccaggaacagcgaccatctttacttcacagcggacaacatacagctcacccaagcgtaccaatcgggcttcatcttccacacctaatgtaaagcccagtgccgactggcagcaatggatgagctcgcagattgaaagaattgagcaggcaagccccacaagggagcatgtcagagaatgtgcacaataccaggacgatgatgagtactttaccagcatagctcgacgagctccagtcgctgtctccgctcccggctcagcaactgtactcagggttccagactgccaaagtatcaccgagcgtaaagcttcagctgagaacagaatcctgtcacaaagcaatttctcccgtccattaacccaggcttccagcatgcgaaccatcatgccattgcagacaactaagtcagagaatatggtgcagtcttacgctaactcggtatccttggataccgctgctaagtccggtgaaaatgattcacccaagtcgatccccgttgcctgcaatcaacaaccgtcgccaattcgactaagatctggaaacatgcagccaccagagtccccaactcccaaaggtgtgggagcaaaacgatccttgaccaaggagcaacagcgacgctattcatctaggcgtgctccgatctcccaggataacaggatcaatcacttccggtccattcgcactcaacgagacaaccgtgtaaacaatgagaacgcgaggcaacaggatgagtacaatgacgtgatggaaagctaccaccaacttcaagacattcattccacgatctctagcaagcgcatggtggatatgttcttggacagtcgccgtcgacaaatgggtgaagtcactgacaacgatacaaccacagaggcttttctttgaacgtgggggactggctcttctgttattggaatacctcgggcgttgttcaatttttgatctgtcatattctttcgaggactctaatcattcattccctcattcattcaaccatcactttgggacatgtatactaaagctccgcgggtcggagttgtggaagcgtggaagcagccattgttatctttcattattttcttgaattaaaaaatatcctacccaattcattcgatattcacctggttgaaatgaataacagggtgattctcaaaagaaacaaaaaaaaagaaaatgctttaaataaacattggacccttggcctagtctaggctccagtggcaaaacacaaatcacattgcccgagcctcgccgttagtgtctcactttatctcgcatcgcgcacttctgcctgaagaaacgttggggctttttgtttttcttgctgaaaatatggccatcataagtcagcctaaatgcgtcagttctatgcgtaatagaagctcccatccattgttcaatgtaagcttaatgaaacaagtctaaaccgaaaaaaaaaaaaagaaatctctccctcggggaatcgaaccccggtctcccgcgcttatcggttttaatgacaagcggaaatcatcaccactagaccaaggaagaatgcgatgaccgagttactgctcggccacttggctggttgatgtgaggacatgaccatcttgtcattataagcgagcatccaatataattcaccttgtagtcaacaaaataatcatggaagcttcaatcaaaattttattcaggcaatttcgataaatatcttttccagtccaaggcaccatagctgaaggtttaatctattcatgagtgggcaaaaatcgataaccgcacgcaggtcatatatatatccctaaacggtaatagcctggcggtgaatattaataggttattacatacaagtataaaattaatcgcctgctacgtcgtatgtaagtgaaatgaattcgcacagatttccatcggaggcaaatcaactgcaatgtattcaaccaaatcagtccaaatagtcacctttgtctggaatagtttgttcagccactggtatccacgcgtggtaataaatggatcgccgcgtgtgactaagagttcaatgtagggatttcccgtgtaggtattggccgtgtgggtattcgccggatgggctgatgtcaaccatgtaggtattctccaaataggtgatcgccatgtaggtattgcccacatataagagaaggggatggccttgtttctgcgtaggttgagggagttgcacaaggtacataattatcactttaccaacaatggatattttcctggacgttctagatactttggtcctcgaccggtgctacgcagtactctcgccagacccaacagccatcttcaacaatgatactcaagccactgcccatttgaaccaacatgtcggggtgtattaccctatgcagccctcgaagtgggcggaggcaagcctctggaagagagacgacattgccagacaagcattgtcactgtacgtgattatatggtaagtcccttcactcaaagtaaccacagcatcctagaaactgagacctcgatacgcaacaggcttttcgcaatgataatgtacctcctcggtagccttctcctatatcacaccctcttcgacaaaagactactccaacacccgcgcttcctcgcacaccaagtcaagctcgagatcaaccaaggcgtctccgcaatcccagtcatggccctcctcaccgtcccattctttctagctgagataaggggctggtcgaagctatatgatctcaccagcgactccccgttcttcggatacaccttgctccagtatccattgttcatctgcttcacagatagtggcatttactggatacaccgtggtctgcatcatcctagcgtctatcgctggcttcacaagccacaccataaatgggcggtgccgactccgttcgctagttatgcgtttcaccctctggatggatgggcgcagagtctcccctaccatgtttacccgttgctctttccgttgcagaagggagcatatctgggactgtttatgtttgtcactgtgtggacggtgctgattcgtgagtttttatgatctacttgcaacgagagtatgatggctgacattgattctacagacgacgctgagtacttgccaacatcggtggtaatcaacggcgcttcttgtcacacgatgcatcacttgtacttcaattacaattacgggcagtttacaacggcatgggatcgcctcgcgggaacataccgaaagcctaagggggatagtttcatggaaggtcagcaaatggatgggaaagggaaactcggaggtaagtgtgaatagatggagatccgggaagggcctatcttgtatttaaatgtaacactctcttgacagggtagtcatttgagatgatattaatatttaatataaatactatgtgattttggatgtctgtttcctctcgagtgttcggaaaagcgaatttaccatgtacaacatttggttatattgtatttatactggaaattatggcggactttgatgacaccattgaatgaattcattcaaattccccaagtcatcagtagcagtgttatccatataccgaaggctgacatcagatctgccagtagcatccagagtggcattcaacaaccaccaaagctcctgggcgtgtttcggatacccaagatgaaggaattgatccttatctaggagaccaatgacagaatcccagatgcgtctccaattgctagacgcacaccgtattctatcgagcgataggtatcttaataagccagctctcgcttggaaggcgagagaattaatggctatatgatattcttagcaattaatcaatggctgattccagttatcaacataccgtaaatcagaatcagaagatgctcaactgacaccgaaagactccatggtattgggtcattacctagaggagtttcaagcaactgcgtgatcacatcttttagaggaggaagtgggagctctgtcgagtgcgacatggcaattctgctgaaagaagatgcactttcggcttcccatagcccagcactccaaggaaaatgacagtccatctcaaagactgatattgatgggtggtttttgaagcagacggtgagaaatccgtccgctaaaaagacccaacaagcgattcttggaactggttagcgatgcatttcaagagaagacaagataagaaagactaggatataaagtaccttatacacacttcctctgccaccaaatttctccaagtcatctcatcacaaacggtgggagcggctcctcgcttgagctggaaaatccctagggatcggatggtggatactaaacatggatgtcggacgatgcggatacgacgtctcgtttgcatactgtcttgtccaaattgaagcatctcaataataagagcactctgcattagctgtacatttgataaaagatgcgactggtctttcggtgaagtgagtgttgataggtccgcaattttgcgaaatatatactcttccgcgacgtcgaacagtccggatggtagggcccctccatctagtggaatagtatatgtggcaccggatagaaatattgcgagtaacagagcattggagatgtttcctgggtcgaaggttggaaaatgcaccacgggtaaatgccaatgcagtgagtgaaagaacgcagagatagaagcagagatattggaaacccccaggagagtagaaagctccataaaatcaagcgggcttagcgttcctgtgcttcccagacccattgactttgaagtgtcgaccaactccgtcataatctcggataattggttggaaagctttgaagggaagagtgtatcaggattgaactggagtaggtaatcatccgtgaaagatggcagagtcgatggtacttggaaagataaatttgtaagttggaaatcaccatcaaaagctgacataggatcagtaggaacgagggcatcttcgatatgggaattgagtgtttcgaggtttcgtcgaacagaacactttgcagtctccccaatcgccagtctatctctttggaaagaaggattggcaaagtgttggagaaaagaaaacgacccactgtctctcgagttcgctcgcgatgtggttatcgaaggcgagagcgaggttactgcggagcaactgggatccccggatatctcttgggttacgaaagtacattctcgcccaaaggagcgacagcgagagcaaggtaaatttcggtcgcaggatgctttggcaaagtagcatagatcacacgaatgccttttcctacctggcttggctgcaggaggcgcaggttgattgaattttttcgcacagtttttgatatgtcttcgtgtgacctcactttcgagcattagatgttatcattatttatagtaatgatactttacatacggctttagaaatgatttgctgcatagaggacagctagaagagagctgctgtgtatctgggagatgatcagcctatgcataatttgtaagggcgttcattggaccttacgggtcacttcatggcgaattaaatgagtcttcctctggtaggctttttcgcattgtgtacattgaaacatgacgtcgacaccagtgttgttacaatctgaatgagaaaggaaggggaaaggggcagtgggcagtgggcggttgcgagtcagcgcgtggacgaattccatccgtgcgtggccgtatccccgacaaatcgtatttattctaacgtcgcaaaattgaagaaattcaatctcaacatgctattctattattgtcttgaatgaagatgagatgagaacagaaatgaacaatctcctggcgcatgcatgtcggtgactttcccaaatatcattatgtatgctatatatatcatgaaaaggaccagcattcttttttcccgtggcccagactgccaggaggaagcttttcattagcaaattttagtatgcagcgctattactccgtacccttgcagactctacatagcatggcatgatccaagcccagtcccagtgatttattgaagccttagggctgggcattgcctgaataaatgacaaattcgggtatagtcaccccgagaaggttttctcaagtgctagtttcctacttattttgccaacgccatgaaaagtaagctgattctttggggcaaactaacggaactttccgaacccctggcgtgcacggaacctggcgtacgtcaaattcgatgattagtggatcaatagaaaatctttttcaaaatcaagttgtagtatcacatcaactagtcgagaaagtctccttcgctcaagcacacggggtgttaggtaaattattatcaatctgcactctgtagatataccgaattttgtatatgagaaggggtggagctattaaaacgggacaaagctcaggatcaaagatgaacactcgcgtgcacgccagactgcagatcactctgcagatgcggaaacagacgttgtggatcataacaagatcgtaagcctggtggggcgcacatctctagcgcagccaaggaggtcaaggcacccccaagggttaaaagaccatatggggtagtgtggaatttataccctgaatttcgaaagttgcgcaatacttcgacgtccgagtatgccatgtcgtgtctgatttgtagggagtagggaatacagaatattttcccctggaaaaaaccgatccggattgcttggcttcgaatgagtcttgaaatgcaccgttcctgactacagacccttgcacgcaggtagccggggttccagatcagataggaggcacatgatgactagtctggggctacgaggactcgaatttggtcgtacagacattttcctggtccaatttgaatttttcggcttattaccccgaatagccctatattgaaactgatgccttgcttggagtgcccctgaactgagatatcacgagcacaaagaactgcctgagatacgtgcatatgggggctggactagctcggactacccccgagcgcattaactaaggcgctaattgcattagcggcccgggagtgaagtgataggtctagcataaggtttggatatcaggtttggttcgttgaccaacttgtcaaccaaaaacgagggaaattaggagcaggggaccaataagaaagttattgacaagcagaatgggctggtctagtctttcttgtttgggctaggcagtacgttgtgatgtagatcgacgtttcctcccctatttttgagatttctataacgaccgactgatggattggcacatataaggctgcctgtctctcttattcattcctgttcttcatctcttcgttgttagtttttttccacccaacactcgcttttgctggtatcattcagcgtccattctttctttcactctaaatatacttccaactcgcaaatatgaagcaatccatgatcacttcgcttgtggctcttgcagcttcatgctccgtaaggaaaaccgtgccattgttgctgtcgcaatttgacgtacactaacagattgtgtcactatagggagcccaagccactgagagcttgattagcgtgcccgttaatctctgcgccgccatcctcggagaggctgcatgcaagcagcagaccgtcaccaagggactgatcagcgtgcccgtcaacgcgtgtgtcgcagtccttggaaaagccaagtgtgaccaggtctcttccgctctcctcggcaaccacgggctccacacccgcgacagcttgattagcgtgcccgttaatctctgcaccgccatcctcggagaggccgaatgcaagcagaagaccaccagcaatggtctgatcagcgtgcctgtcaacacctgcgtggctgtccttggagaggccgagtgtgaccagacctcttcctcctctggcagcggcgacggtaccttgatcagtgttccgatcaacgtttgtctggctgtcctcggtgaggccgagtgccagcagaaatctacctctactggtagcttgatcgatatccccatcaacctgtgcctagccgtcttgggtgaggttgattgccgtgatggatcgtccaccccgcctcccgccactgctaccccatcttcccccgcgcagaccactaccccggttgtgattccaggaaagactaccatcccggctattgtaccgggtgagactacagttcccactgttcctgttgttgttcctggcgagtctactactcccgtcgttgtgccaggcaccaccatccctgtcgttgtgccgggtgagactaccgttcccactgttcccgttactgttccgtgcgagtccaccatccctgtagttgttccgggcgaatttaccacccccgtcgtcgtgccaggtgagaccaccaacactgtcgctgttccgggaaagactacagtccccactgtccctgttctcgttcctgtcgagtctaccacccccgtcgctgttccggttgagacttccactcccgttgttgtgccaggcgagtcttccatccctgccgccgaggcttctaccaccacagtctggactggccctaagggacctggctctcctcactcctccggtgatgcctccgcctgggttcctacatacacccgtgttccttccgtcactgtgggacgtccatcccacaccggcagcttcacccgtgttactgctacctctaccaaggccatcactggatccaagacctataccggcattgtggctcacacttctcccgcctccggtggcaacggaagcaagcccagcgccagcaccattccgttcaacgcagccggtcgtgctactttgtccggcgttgccgtggtgttcggtgctctctgcgctgttgctatgcagatttgagtggtggataatcctgacaaaggtggtggctggtggctggtggggatagttgggttgctcattgttgagatttatgttcctgttgcgttggacatatcagtccgttttactcattctccttctatattcgttaaatcaacatgaggtaatataattacacgatatacgtctctcaaattggtttttgttctcgcagtttagactgtctatgcatatgatgactctattgattatcaggatgtttcttgattcttgtacagtagtttaatgattcttgattgtaaaagaagtatcatgtgtattcgtagaaaagcaaaaagctagcgtggtacgcgtaccgataatcacgggggtcccagaaaactaataatagactatgtgacagatcgtatgcgaggggccatactccgtgcagatctatttctcaaaccaaagcaagtcgtatacaatgatacatagaggggggattcccaaaatccggggaagcgggtctgcgggtccaagttcgagtccttcatgttcccgaaagaaaaaaaatatggtagcctcccctaatttgtgtcatgagagatctactcatttaaaccagccgcgtaacgggttctatgcaggtgcgttgttagcgaatctcaatcggtcctacccccgacgaagggaccaggcggaccaacacctgttaggattcctgtgttctgagggatctcgccctgggtgaacgcgcgatctccgggttcttgcagttaacggaaggtggacagccttggcccagagaccgcaccgacggtcagatatcactgagctaagtggagctataactgttctgtttgtttgttataacagagctttttttattcttgtgatttgatcggtggatatctcaaggttgttcttcttaattaggtaatcatgaagctattccaaggttcaggcatttgacccttcgcagatcgtatgctaagtgagaattcatattattgcctaccgccaactttttgaaagagtatattaactagtattcttttatttcttcttgctgaaactctctcggcgtattttccaacgaaattcagagaggaaactgggccgcgagttggctgcaagggggttccgctatcggcagcttgctttttttctagctcatgagatcctggtatttcattggagtgctggcaaggtgttgagttccaaggatggcatggacttcaataaattaccatttaggtttcttctaggcattagtccggtttcttctgatccgtacacgaatcattgttgcccaccgcaatccattcctttgttctatgcgcactctcaatctgccttatcggtaactccaaatacctcccttaagcgagtatcatactcaattctatcctgtcgctttgtggctccaatcctcacaaaatcctgagaccagtaccatgacattgtctcttggaaggcctcatccggattctgacaatattgactaaagcggggctgaatttgcttgtagaagaccgaaaagagaccgggcttgcgagtgcaagagagaaccagaacgttccagatcgccagctccggtccattatcccagagaggtttgcctttcgagaagcctccccaaataatccttcttcattttccaaaatttccataagttcagtcctggctgcttcataatcgactgcatcttcggatatttctcggtcttggatttcgagtaacaaaggacggtttgtcaattggaggtaaccgtctttgtcgataacgaacgagccaattgacgggagaggtacacgcgctagacttagaaaaatccgagagagatcgcgaaaaaatgtgcgccggtagagggtcttagtctttttcccgccaggtagacgaaagcatttgtcccacattcctctcgatgtgctcgataaccaagtagcctggatccaacgcatcgcttcggtatctcgatactcgggatttattgtgaacatacgacgaaggaagggaacgtcctaaagacgaaagaaacaggcggcggaggtgttggaaataccggcttagtagagggagattgtcgatgtgcgagagctaggaaagtccatcagtatggtgccggttggttgtaaaaagaatggaagccacacagtctctccatcagaaggcgcaaacccgtaaagacggggaatgggtatgtcagggcaattatcttgtagccaagcatacgtccctgcttcgcatcgaatcttctcatcgcaattccctgtacaaaagtcctcgcctagtcggtgtgaaagaggaagtcgaagcaggactcgagtccccggctgttttctgactttccaatcgctgacagtgacaggtatacagacgttgaaacttccatgaagccaatctttaacatcggccacttgacatgagacggtcgatgaaaggcatgatgcgtgacaacatccttgatccaatcccgataattattgagactggcaaaaaactcgtgtctttgactgggatattcgagtcgacgtaagatgttgacctcttcttttcgtgcctttgagtaagtgatctcacctctcaacagagggagggtcttcggcattgtgtaggtccttgagaatggactttccttaccagtgagagcagattccaggccaccgcttgaaaattgcaggttcgtaggtacgacgttgtggatcaaattgtcaactcgatgagcgccaaaccctgcaaataggggtagttgcctggttgcctaagacgtggtgtttgcttgtatagacgttgtttaaactcaggtttgacacttcctgggagagctgatgagataggactgtaatcgtgggtccacagctttctcaggtatggaggtgtttgtggagagttcaggtcccacgggtgttgccatcgggtcccacgttagcttccgctgtaaagcttatgctaaattcctataaccaatacaaaaaaaaaaaaaacaaattatgtagagtcaagactccattaacaaggtcaaaatcgaagaagacattagaaatcagaatgtcggtaaaaatgccaaaaaatcctctgacccgggatcgaaccagggacctcaagatgacaggttctttgcagaacaggacaattacagtcttgcgctcttccagctgagctatcaggggatgtgattagaataaactttcctttcttgatatatgaggacaaaaatgttaaaaatcattaacccaaaaaatcccctgacccgggatcgaaccagggacctcaagatgacaggttctttgcagaacaggacaattacagtcttgcgctcttccagctgagctatcagaggggtgattgaaggatgggcggaatttggatattataacctggctgaatccatgtctttgggctgcgaatgttgtttctggtgtgatggtaggccaagtgaatgagaactgcccaatctagtcacatgatgttaggctggtggaaataattccacctggccgctctgcagcatacgggatagttcacactgcatgctgtacacatctaaaaccaaaaaaaggaactataacaatgcggaattcctgaatatatagttgcctccatgtgcagctatcaaaaaatggaaatcacaactataatacagcaatagccccaggaggcgagcccactccacccttaagatgcaacggcgcactagtcaagaagaaagaccacttgttcaacgccgcgcattgtgtgctcagcttttccaggtcccataattccccgatcggagtaccccactgacacagtagccactcatgcaggcaacagtcctgagcataaggccaagcttcgaatcccatggtatcacaggccactgcagaaaactgtttatcgtatagccacctgacggttttcatgttgccttcgattccaatatattggcaagatctgacgcctttggcccttgcctcgggatctgccgtcctgtactgaagtcagctagaaactcatgatacgctgggaataggtgctttcttactcgtgccatttgacgaaccccgtccggaggatgaatatatcacccggtttgcattgcgtgccttgccattttaaggtttcttcgatttctgacagcggaatggcccaattactgacggcgttaggaggagtgcttgttggattgtggtgctgccaccatctcaactgggcatctgggtcagttgactgaaattaaaaagtagatctcgtgccaacatacccaatcaactaagatgcctcgtccaacaatgcccccgcgctcgcagatgtctgctagccatcagtcattggccctccacgacaattcgtttcacttactatgaattccgttctcgggccccttaactgcatcctttaatgtgagcccgttataaaaaaccgcttggtcctgaatcgcccactatgtatagaatgactgtaaacaccaaaacttggaagtgaggcaaggaaaaacgaacgtgtttgagactatcccactgtgaactagtctgggtattgatataaatttcatcgtcaagaccaacaaagccctcagcctccatctctttgacatgatgacacaatgtagcccgtccagatcccggaaattgtagattattcatggaccagtcaagctggacatgatttccgaattggatctcttttgctgcctcccgcaccaccgatgggctgaggaagttgagagctgataacgtcaaaaatcttagaatagggtaggaaacaaaggccgaacttacttcctaactcgtctttcttgccaggcttgtcaaagaacccccagaggcatccttgcggctggccagctacaggcgggagatcttcgaatttcgggagaatataccgtggctcccggtgatcgacattttcatacgatgccatcttatatgctcctatccagtgttgaaaccttttgaagcggccagggagacctctttaagcgcggagaggacacccttaccgagatttggggtcaaatgccgagtaatctcgcttagccccgcaacttcacttccatgatggcttcccgtgccggtggggacgagtagccagtccccccaccttgtgcttgaagaaaaggccgaagaaagatgggtcaatcactccgtactccgtaccgatatccagctctaggggcttcaaagccccaagcaaggtagatggcaacacacattactggaaaatggattgttgttgatctagaatgtcccgtcggcatcttaggagcgtcggagaaaagctgtcccgagaagccgaaatagttggcaccacgtggaaacgggtaggttaccgtattgggcagttgggtggatagtcaatatcgagtggtacaaatacttttgaatgggagtctattacagtgtggatgtttctgagaaaaataataactgtttgtcggtaaacaattctgcttgcaggaaatggtccttagaccagatcagccgtgcaagtacgaattaagtgtccctggggcggtagaaatctcccctctccaacaacctaatatgactttccctccgaatatatcagagacatccgggaaaatgccgtttttgtagcgtgattcaatatcatggtctatcacgtcttgtcgtcggagtcgagctttgatgatatccggatcgtcggatttcggcccataaagttcgctatatagtgcctcgccaataactagcttaaatagggtagatcctagggcgaagatgtcggaagcttccgtgttgggaaaatcataatctcttggtaagcagtgtgatgctttctcatagccaagcgctacgtggccaggacactgcgaagaattgaaatcgccaagtcgtagatcaaagttctcgtcaatgaagaactgacgtagagcaaggtcggaatggataacaccatggctatggatgaaaacaatagcttccaagagctgctgacaccatttggatcgaagctcgggagtgattggattcctccaagtatttaacaaagtcaccataaggatagtatgtgatcccgatatagtcggatatgccccttgatagccattcggcaatccgtggatgtgttccaagaatatcgtagatcagagcctcacgtagtataggtcgtagatcttcttcactctgactgcggggaattttccgtatgataagatcgtccaaaaggtttacttcggcgaatattccaattgtcaagagctcgtgattatcccggcgttcggaggctggtcgaatagtgacggtagggagtggtcgaatagggaaggtaggtagcgtattttcggaggactggatatcgacctaaaggatgatattaaacagagttaataagaatcatgttttccacccacagattgcaagcgctcatcatctgtaatatttttcattaggtgccgtcgaagaaaacgtaataaataggcgtctaagcggccggaggaatagactgagaataatcgtcggaaccaatgttgcgcttgtcattatttggaaaagacggtgaaacagagagaatgatgaatatgtactccgtatgttgtacgcagatgcagtagacatgtgaccgttactactccgcaatgttcgtaatttttgcacgctggggtggcttagaccgtactaaagaattgtatatagattcgccggtatcgaggtggacgaggaaaggggggaaatgagaagggaccggagctatctactctagctacgtgtgggacctgtaacttttgcttgtcatgaagttgagcccacaactcaatttgctagggttcgataacaaagatgggttggtactttatatgactgatattggcaaagcagtcctcaagagtgagccctcaagtaaacagtctggacgaggaattttgtaatgaattcaaaccttttcactcccttgaccagggaaatcttcaacctcatccacatagtgcttatcgccaatcttcctgtccttgtcaccctctaaagctttctcatcgaagggcgagttgaaaaggtcagaaatctcttccaacgacttacgcccagtcttctcggagtcagcagagtatctggaggttgacagtttcatttgataaagacttacctcgggacagtagagcagcacaaatgcaagcgttgctgaggtgcaggcaatgaaaacaatataatatctccatccaatggtagcgaaggctgtaggtgcacattgcaagaatataatcgtggcaagaaacaaaccagagattgaaactgccagacctctcgcacgcacaggtgtagggaagatctcggaggcgtaaatgtatgacgttgcatcacacgtagttgaaaagcatgccatgtggaagaaaaggaaaaagattgctgcgttgacggcggctttggatccattatgttggaaaatactaaccgagatgcattcaccaatcaatgccactatcacgccagtataaccggccatgagtagccgagtgcgtcctactcgatcagctagcagagagttgatcaagttcccgaagggggaaattgtaatccagccagcctgaatgagcagctgggagtttgttttgaagccaagggatttgtaaagcgatggaccgtagtctaattaccgttagtaaagcctggtagggtttggacggataaagtactgttaataaccaaggtggccgttccctggcatccgaagagaaccacgaagcctatgatacatcttttccgaagggcaggtgtggtcacaagagccttgaagctatgatcctccgtattttccacacggatcatactgcatagattggcaaagtttgccgccaattcttcatcgtcttcaggggtcggtgtgtctgacgaagcagacactgctttgtacgcttcccatgcctgatcaatgcggtcattgtatattaaccagcgaggggactctggcagaaacataacaccgattgtcaggaaaatagggggcacgcattgaatagccagcggtatcctccactggaccgcagaagcctgaacgaaggagaatccaaacccgatccaactagataaggcatatcccacgcagatcatcacaccgtgagatcccacaagcaggcctctaatacgaggtggagcaatttccgactgatacaaggggattaaagcaaccagggcaccttgaagtttcagatatttagcgagatcgtagcgagcgaggaaagaccataccaacaccaagcccagtcacaaagcggaagacaaggtacgcgccaatgtgaatacctgcaacttgcaaggctcccccgatggcactggtcaaggaggccagcataatcgactttcgccttccgaggatgtctgcaaatgcgatacatgacaagcagccgaaaagccctcccgcctggaagagagcattgatagcaccttccaagctactggcatttttgcgcgtatccaaatcaaagtacgagagaaatgagggctgggcgagagtgcttgagatgatactggagcaatatccgtaggtcacactgcccagtgcaacatacacagagatctaggtaggatatgagccgtctgatgaactgaacgaataaatcaaggactgaccaaaatgcgaaacatagaatttgagagatgcatcttgtgtatggagctttggtcgtacggtgtcatgaaccagtgaagcaatccctgaagagtaggaaagcagatttccccggtgtctgaatctggggcccccgggcccagctcccgggtcaccccacacccaagataccgaggaggaagaagtttatattgatcagctcaagtggaaattggctccgctagtcacagtccaaattgcgtagaatctcgaaagtgggatacatacatccgactttgaaagaaacaacgtagagaatcctactgaacgtagtttaatatcgatcccatcaaacatcgatggcacccgaattcctcctgtttcccctcggctgtttcttttttttttttgcttttcggcgactccaaaaagtggagcactggtggtttatatccacaatcgaaacgacgttgagagtaaacttcccgaaaacgacaaaagaccttcgcctcctacttgaacgtgggttggatgttcggtaaaaaccttcttgccaaccattttagccctgtagagcaaaattggagatatgcagagctcggtatctcccatgggaagctcaaattacccgcccagtcacgtggaatatttattggtgtgggtagccccacttggcccgtccgtgggagccccacaaatcacatggccatccactttcgctaaacattaactaactcgtgaagaagggacccaggggcaccacagccctgcttgcgaaactgagtgagagcaaaattttcaatgggagtagtagggtgttagaaaggagaacattatggggtgactactagaagaagggaagaaggtggaaggtgtccgcgttctagtctccgcctcagggtactccgtacttttatatcaatcatatcaatcgcatggcttcaagcaattattcattagtcaatttttagtcatcctacactaaaccctggaataaacatgagtcaagctttccctatctagattatagatctgacagtgaaaggtctgaaatagggcaagcatccctgaatacctgaaaatttcacagtacacgatagccatgtcaacccgactgtaaatcatttactggtaaatatgagcaatacaaatctctaattccgtggactgacagcaaagctaacaatgtgacaccccatagcgtggtggaggcactatgaattcatactagaaaatgttagagtgttccaataccacgctatgaagaatcttacttgatcaaaatagtctttggctcagtaaatgctcgtaaggcctgggaaagtcagtaaatagcaaactcttaaagttcgatgaacgaatgctcacatattcgccaaattctcttccaattccagaggctttcttaccaccgaaaggtacttggatgttcatctgccctgttttagccaatgacaacacatgtccaccatggaaatgacataccacactgacacaattaacacctactacaccagattctatctttgaagaaactctcatggcacgattgatgtctcgcgtgaatactcctgccatcagaccatactcggtatcattggccaattcaatgacttcagcttctgtatcaaaagtcttgatcaccgagaccggtccgaagacctcatttttgtaaatttcagcgtccggcttggggttcaggaagacggttggttcgaggaaacatccctgatcgccaatgcggtttccgcccacggccagctcgcattcattcttagcccgtgcaatcattgcctggactttttcaaaggctgcggcatctgctagtggtccgaacttggtttcaacttcctggggatcaccgatgtcttttaccgcttctttcatccgcgcacaatatagatcaatgaatttggaagcgattgaacgctggacgtagacacgagatgccgcgacacaaacttggcccgtccgcgctaagatcccgttgattgtcctgtatattgtcattatactgctctcaaccttagaggctttgaactcataccatgtaactgcattttccaggttggcgtcctcgaatatcactgccgggcttttgccacctaagtttcagtcagtaggcttacttcctcgagcttgcatcatctcgacctaccaagctctaatgtgacccgctttagattgctttgagctgcagcaacttggattttctttccggtcgcaacacttccagtaaagctgatctttacaagtggtttagtaacaattttcaaatgagctttgacggatattgaatattccttcttacctttcttactctcatatggctagcaagccgcgcccctgtactgccatcccctgttaaaacttggacgacaccaggcgggaatcccgcttgctcaaatagtgctgcaactgccaaggaacctaacgggctcttttccgatggcttcacaatgagtacatttccggttgccagacatggtgcagctttgatgaaaagggatgccactggtgaattgtaagggttgatggcaacacagacactgttagatttgtcagtatcaattttgtacagaaataaaaatacgttatgtggagcggcgtacccaataggctcatgcctgacaagctttacaaacccgtcgtcgtcagggaagtaatctccgcgttgcttgtctgtccagcccgctacaataaatattagcgtctagggcctgtaaaacgtttcaattaattctcgcagcaccctaccatagtataaaagacagttccgaatgtagttgctctctcgggtcggaatgagtgagaccgggttccccgtcgtcaaagagtcaagacgcagaatttcaggcaatttctcctcgagcagattgatcaatcggtgaaaacaagccgagcgctcggtagcgctaaacttcgaccacggaccattgaatgctgcttcagcgaaccttacggcgttgtcgacatcgacatcgtccgctatgggaattccatctgcgacaagtgtgttgtccttcgggtttaggatggaaatggactcggatgaatgagaggcgctatacgctccattaagatacaactgattgaatgtaattggaatagacgaattgaggagagacatttttgccgtgaagttgatgagaggcttcaatttaactttactagataatttccgtaggcttcttcttatatgacaaaagaacatgagatcacgaaacgccgggtagattatattcggcttctcaagaatctttatccgagaatgaaaaacaagatgatatgagttccctacaatagtccggggtccggggaaggtttggccctttcctctcggcttctcggcgcggcactttcgctccgagtaaagagaccgaacgccacggatgaactaataaattgggatagaaatctatgaaatgaatttttcgagaaagggaaaggatcaagttcacattctcaatcatgtctatgaaagctgttgttttccgaggcccgttcgacatccgtgtcgaacagaagccaagaccgcggatccaagatgatacggatgccataattcgagtcacattggcaggaatatgtggaaggtatgaagtgtaccatatctgaagatttgcaattggctaattggcatagtgaacttcacatgtatcgcggccatcaacaaacggccaccgggcacatcatggtaagtcgtatgaatcaagtgacacgacaaggctaatatcaatgaagggtcatgagttcgtcggaatcgtcgaggaaacaggaaaggatgtcgccctgtttcaccccggtgatgagatcgtatctatattttctccagtctggtaagtttacaggcctgggtatcgtttacttccagctgctgatgataaaaagtttgaaatgctggttctgtcttcagggtttaacaaatcgttgcgtcaatggtgtggcgtttggcaccagcttgctcaacggcggtcaagccgaatacgtccgcgtccctttcgccgatggcacccttcagcatgttccagcaaaactagatcgccgactgctcatcatgatgtccgacatctttccaacaggatactacggcgcacagcgagctattgagggtcttcgcacacagtataattccagactcacatctttcaatttgaaaacagcaaatgagaagctccatgagtcgaccgttgttattcttggttgtgggccggtaggaatctgtgccattgctgcagctcgctcagagggaatcaagaccgtgtttgcgattgatagcgttaaagaccgcttggatgaggctgaacagttcggcgcgatcccgctcatgctcggagaggacgatataaatgctcgagtgctggaggcaactgacaatcgaggagcagatgccgttgttgaggttgtcggaaataaacccgcacttcgctctgcatttgatctactacgcccatgtggtgttttgtcatcagtgggcttccatcaaggcgagctacccttcacaggccttgaatgctatcaaaagaacatcacgttagtttcttcccttcctcgattaggttgcccggtctaacttcatgccctagtgttaactttggacgcgtacccgtccgtaccgtgttcgaggatgcgttgcagtgcttgacggaaaaccaggagaagatgcaaagctatattacgcatgagttaccactggatgatgctgccaaggggtatgatatatttgaacagaggaaagcgagaaaggtcatcctcaacatttcgaaatagctgaattgaattgaacataatcaagtccttacctacacgtaaagttcatttcatctataaatcatgatcaatagcgtggacaattcggcatgataaggtttagcgtacacatttttggatctggaggtctctaacaccgccgatgatagcctctgcctcggcgggttggaccgatcagccccgaggaaagtaccatggcctcatttccgacgcttaatctgaccaatcacttgaggtccaaataaatcaataaccgtttaggtcaagtgggatgtggggatgtactccgtaccgtaggacgtgaatgtgttgccgtcggcttcttccaatcatcgccgcgtggttagtcagcaatccttcggcttcatcttccccgcatgcaccccagattttgactgacctgtaagtgatcccggggtccgctgctcggggacttctcttctaacaacggcaatggatatcgcaaatagggaagccgagggcccgaagcagagacgcacacgcgtggcgtgtcgccggtgtaattcaaaaaagatcaagtgcaactcacaagaggaagttccctgtaaaggatgcgtgtcaaccaatacagactgtgtgcccatagaatcacagcgagggcggtatgtgccagtgtcaagtgacatctttttcgaaacataacggggtaatcttactaatgttctgcgtctaggtacattcgcaaaggtcctagggcaagaaatgctggaaaatcgcacgtccctcagaacgataaagagataccaccaatagcccgctcgtcgaatttccctactagtggtgttgaccatcttgccgagtcggaaatacccttgcctcccgaggatcagacatctagctccttccaaagaacactcgatgcatctgatcaagacagtgattgcaggttctacttgcatatcgcggaccaaggtgtcagctcaacacctcaacctatctcaagtcaaaagggcactctctttcttggcgaatcctttagcctgacatacgtcgttcacgacgtcctggcaccccttctcagcacagagtgtgcacccaactaccgcagacgcctccatttccctgtcgatgaaggattcgatccatctatgagaggtcagcaaaatatggttgaagcgcagacaaagctgctccatagcagagatctatggttccatccagaccaacgagccttagaacagcttcttgccatatacttcaagtggtttcatccagcgttccccattctcgaaaaatccagttttttacaaaaatatagtgagaatcagttatcgttacttttactcaatggtgtgctcatgattgccgttacggtctgtgacgaggcagacttggcacttcttgggcttcaagatcgctacaaggcacgcgagcttttttacaaacaagcccgcgcattatatgagactgactccgaccctgataaaattaacaatgtggtggcttctttcttgattagtttctggtggggtggtcccaatgatcaaaaagactcgtggcactggctggggattgcaataagctcggcccagaaccttggcatgcatcgttcgtatgtatattttgcttggctcatggtgtttgtatactgacaatttattcttttgctcaggacagcgaagtctcatatgtctagccaccgagtacgaatatggaggcgcatatggtggtgtttacgagtaagtatccgcttgatcttgtcgtactctctttctgacctagtaaaacccagatacgagatgttttggtcagtagctcgattggccgcccgcagcacttttcagtgtatgattgcgatgtggaaatgctctcgtcgcatgacctggagggcgagtttcaaaatgagacagaaatacactatgtttgtcagatggcccgtctttccacgatatgtgagtattccgatcttagattcatttctgttaggctaattgacaaatggatagtcggtgacatcatttcctcacggtatgcggcggtaaaacccgatcatccttcacagatgaagattcagctcgagaaagaactggatgactttcgctcgcaaatgccaacaattttgagatatactggaattgacgcagagggtaagatatgtctatggtcagcaatgctactaatggcgtacaagttagttcccctccctcatgattacatgtacatcatactgagacctggacagctttggagtcattcttctttgtcggcctccccatagcaatggcttagacatgtctcaatcatggggcaaccctttcaaagcttcatcggccgcaaatgaagtcacccgagtgatagaagatatactctcactctcaatgggaagggtctgtcaaattcacacgtatgatagtccacccaattgcagcatgagactcggctgacccccggaaatagaatcccggcactcttcaactcccttgctatacatgttttcacgatatgtacctcgcgcgctattggaagggaactcgccgaaaaccgagcacgtacctgtatgctgggtctaacgtctctacaagaatcctggcccgttagtgggtggattctgcggcttttcgtttatatcatggagcgattgaagtccacgtccaaatcaccgactatccctggatctaggccaggtctcttggatacaggtcctcatttggggccgggctcgcacgtaactgatacaccagccgcaaacactccgcgacaggtgcgtgatggtataaacactccaaaccagcaaacacaggccagttcgcatgcagctggaaacatatttgaggatttggatacatttcccgagatgtttgttcctaatatgtttcttccggacgcgtattacgagggccatggagtgggccaagcggacttttttgatctgctacgggttcctgactgggataacatggccatatcatatagttcttgagaattgtaagtatcaaaatataatttgcctgatatactgcatacacattttctcacttactatttactctttagaatcggaggcgctcacagccctagagcttgaaaaattacccccacgcatcgcttgacaaccaaatcggcgcacgcagctctctagtctatcttacaataaacacgcaatcgcagctgaatattcgccagtgattgtgggaatctattgtgtttacatatgaccaattacttcagcgcgtgataggcgcacccagaaaaattcagttctgtcctggcctgaaagcaatttaagccggaggagaaagaacggataaaagttccctagcttaagttttcctctgctgtgttgattgagcgtccgatggtatcattttagtctaaaaagactacgatggtgttagcgaccccccaaattgcaacattcttcacaccgcgccctatcaacaagctaattagataaatcgttcttatagaaagggttatctctagtaggaaaagaaatatttctaagacgatttaacgaaattttcatacttctgttattagacggctacacttgagatctcacatttctatgaccacaatgagtacggccactgcgcccacgcgaagatggtatcattggtattccccggatgatacgccagaagagagaaagttagtgttaaagctagatctgctgatcgtcccatatgcattcattgtctattggctcaagtacattgatcagggaaatatcagtaagtcaatcaggaaaatctatcaaaaccaatactaattgcaccattcagacaatgcatatctgtcaggaatggctgaagagctcaacttcactggtaacgaattagtccatttccagactattttcacagttggcaatgtcgttgcacttttgccttttatgtacctctttccgcgggtgccgatgcactggctcgtcccaactctcgatctcatgtggggaatctttactctgctgcagtatagagccacaagctatgcagaaattatggcttataggtttttagtctcaatcttcgaggtatgactccccaactgtccgaaaggaatccatttctcttactcatactgataggcatcctattttcccggtgtgcacttcgttctcggatcctggtataaaagcaacgagataggaagacgaggaggagccttctacgttggcctcaccctaggctacctgaccgctagtcttctgcagggtgccacactcgagtacctagatggggttaacggactaccagggtggcgatggctttttatcatcaatgctatcatgaccctaccgatggcgcttgttggctacttcatctatcccgggacagtcgataagcccaaccgtctcgtgatttcagaacacgatctagagatagctcgcaggcgactacaaagacagggaacccaagtcaaaagcgcctctttctcatgggcactcggcaagaagctctttttgtcgaagcgattctggctggttcttatatgggatgggttctttttcaactctagcgctaacacagcgtcttttctcttgtggttgaagagcctccaccgctacagctccgaggaaatgaaccagctcaactcaatcagcccggcacttggaatatttttcattctcttcgtcaatatcagcacggacttgtggcttgatcgcgcctgggctattacgctggcttcgagcttcaattttacggggctggtcattctggccatctggaatgtacccgaaggagccaaatggtttgcttacagtgtgcaatactcgtccgtcgcggtatcttctgtactgtatgggtggatgaacgtcctttaccgtgacaacctcgaggagcgcgcaatcgtactggttctggccactgctatttccacaatgtggacatgttggatcccgctcttcacgtacccaactgtggaaggacctcgctttagcaaaggataccctttttctgcagtcatggctgcttgcttggtgactatgacgttcgttattcgttatatctatggcccgaatgggtaagatctccttcatctttttcacgagggtgaccggttgctaatggaatgcagtgagaagaatataccatatgcgaacgatgaaaatgtgtccgaggatgagtcgacaggcacaattgcgatttctacaaccgagagagcgaagaaggaccaggtttctgttgtggggacgattttgtgatttgattaacgtatcttcatattgtacataagggtttcatcgcttagagcgttgagaggactcgctatcggaaaattgttggcgacctgaggttctacatatttgcaggacctttctttgtaaataaatttttcttcatgacaccgtccaagtgtattaatttgaacgtgaagatataatgagtagagatcaattacttccgatttatctcgctttttggtgaaaataggtagtcaaaactatagggttttgggatgaaacaggggcagggggtaactttatacagagttttcattatattaatctactctctaattacccattacaggttatctgagaaaccgtgaaattcaattgcattttaccatacgaatcaagtccttagcctctgttcatagaaatgcttcgtgccactgatagccgagggaaggaatgatgatatagtcggtactgccaggatcacgtgggcggtcacttgtaacacttcgaagggctgagctcaacagaaccagaattgacctagcaatatctcaaagaccttgcatttagaaaagaatgttatgtttatgtaggagtcggtcgtaaagctaacaaatagaatgcttaaagggtagttgtacacagaaaagtcctccgtacagcttccactttttcccgacggttgattcacatatcttaaaggggaaatatcagtaaaagagacataacaaaaccgcataagcggcggattattcttatcaaatataactagatgtagtacaaattccgctgtacccaatagtcaatgcacgtatataccaaaagactaaagagtgccttattacccaaacaaaaaccaattgactccttcctcccatctatacaaaatccacagcattattgccaaaacacgaatggtgcttgacctagggccgattgagctgttcacggcggtaaaagagaaggaaaccaaagctaaaatcacgattagtacattgccataatatgagttagggaaaggggcgggggtcactaacctagcaagaagctggaagaaaagggcaatccagaaccacgcattggcaactgtgtccagcgacgatccaacagcgggggagatgcttgctgggccgaccttgttgggcgcgaatccacgagcacaaattgtggcgatggatccaagagactgcgcggctaataggacgaaaacgacgtgtactcgtgttagcgtttgtaggagaatcattccaagaccgacttgttggatctcgtcgagaacgccgagccagagccagacacaccgggatgcgatggcgccggaagtcaggcctccagcccatggaaggtagtggccaatgttggatgttccccaccatgtttgcgcccatcgtggtgcaccgatactcaggccgaagacgggcaagatccaactgtgctccttggataagaagcggaagagtagcatcacagcgatccagaggataataaagaagaacaggaccaggaggacaatgtaccatggtttggtgtgctgagaggaccagaggaatgaccagtttcgaccgaacgcggcggaaaggaaccaattctggacgatgaccatgaagaagaaccagaggacgattcggcggcggaagagggaggtgtagaagaagaggatcttgccgggtgcttggcgatagtacttaggcaagccaagggcaagcagcataccgatgatgaaacaaaccgcggcaatgggcatcaccacagccgagagtctccaagaattcaaggcaactgtggaaacacctccaacttctgctgaagtgaccctggaactccagtaccacagggctacagtgtagagctgagagattccctggatcatactggcgcggaacatccaatccttcacagggacggcaccttggtcaccaaagttgagagcaaagaacaaggaaccactggaagatgctgcggcataggtacctgcggcgacattctgagcccacgcttgaccgagatccgagagtgcgaacggagaaacgccaatggtgatgaatgccatgcagtagatgaaccaggggagagagaggactatcacggacgggaagcggtagaagaggaaccaccaggcaatggaagagacgcagtagattgccgcgatcacgtagagcttgactgccgtctcaccaatctggccagccagcagggtgatctgcgcagagttcgttgcgataatctgtccgagacccaagaatagagcataaacaggccagtttccgacgcgccatctcatgaagcgctggatcgcaatgggtctcttgtatcccagacgagagagccacagatcaatttcatctgtgttgttctcattcgactcttcgtgaccttctgtgacgaggctgtacggtggggccggctcgtcagtcttgtccgagccacttccagtcacgggccgctccttgggctgcttcttcaactgcgcatcgctgtacatgtagaagaacttccgctcactcttcatgagataaagctcaatacagtaatctgaaatcgagttcttcttgttgaggttggtgagctgctgttcaaagtgccgcgtgaagtagcccatgctgtccgtaaaggtcgggtcgaccttttgcagatggaagttcggttgatcatgatcaccaacaacagaaggcaaggagaggacagacatattcggagcgtgagcgaagggtacagctgaatcagaaagatcccgagtcagtctcactggagaggggtccctcgacatgaaacgcgttgactctgaggtcgacgagattgactcgccagactgattactgtgtctggggtgcgcgccgaactccataggtgaattgactgctgccatggcctcttcttgagaaatgagtttctcctgtggtgtggcagtaccatcatcgtcggcgtccgtggtatcaccgtcggtgggctcggtgaactgactaccacgctgcgacttcctgaagagacgctttctgccatgtcctggtccagaccgtcgaccaagggacaggtttcgacccagcatgctacctctgttgctttcagccacttgcatctcttgagcttcgactgcctgtagctgcagaagggaaggctggaaaggctgtggtgctctaccaagtggtggcgtatccaaagccgtcgctgactggaatgatgaagggcgggtgaccagtgcagagtctcgcaacgctggtgtttcccagaagatttgagtgtctcgcgccgtgcctgcaacagtgagttgattcttttggtgatggatctgaatagatgtccgctgtaagacctcgagcttctgaacccactcgagaacggggaatcgctgcttggcagagttttcgcgcatctcttctcgggtctctggtgttgagtccaaagcggatttgatggcggttctcaactggtgcaagagatggcgggctgagtcagattcgacagtgtaccaccaaccaggcatctggcctagaccaccaatgcgagaaccaattccaagtgcacccttacgaccaaactcaacggcaatcaatccgaagggctcgtcgcgagacgggattagggcgaagtcggcaccagagaacacgaagggggggaggaccgtgaactgtggcttcgagcagacacggcctgggaacatttccacgatgcgttcgagcttgatagcagccagcttaccataaagatcaatgataggaccaatgcagatcagctggacattaggtctagcagacaggacagctggcataacatccgcaatcaagtcaactcccttctgcttagaccatcttccgacaaatactagcaagtcagcgctgggatcctcgtccagaccagcccacttctgtgcctgggctttgtcattggcgtgctcatcagcagactgaaccgtaacttgcacatcggggtccttcttcagggcggctgtgtcggagggatctggattaggaagactgccaatcttgccgaggctccagaagattgggtaacgggcccatgagcgctttccgtatttctcagacacaccgactgcgccaaagccacgttgatggaatcgcaaatagctagcaccagtgtgaagcaggttgaaaacgctgccaaactgacagtactttgtggccacttcgactgggagattgaacacagcacagacttctttcttctcttgtgcggtcctcagagcccaaagaccttggaactcggcattgtgcagagacaaacagactggaatagttcgcgacgggagcaggtaaagcggtgccacgcagccgtggaaatcgttgatgtgatagagatcaatcgagggtgttcgccgcattacctctgcaatacattgattccaggccgaatagtaaatcgcactgtcaaggtcatccatacgtggagggtatggctcggccttggtctgctggcggaaaaccggagcatcgagtagaacataggtgatgttatcgacaacgtgatactggaccttgactgagtagggatgatctaggatcgtcaccacgaaaggttcaacaggcgtatcctcagggtagtcaatatcgccgacacacgggaccacccagatgagattctggtgcttcagattttgggacatgagctgcgccatcactcccaggccaccaatcttgaccttgatcttccagtcttgaatgtcatactccatagtggcaatcaatacagtgcgtcgttgatcgctcgcgcctgccattcccatgattgttggcggagccttttctgccatattgatctcctcgacaccatctttggaaaacgttcctttgattctgcgccaaagcactaccggaaacttctcggccttgacggcattgccattcaggttgagtttgacacggtagaagtttccgatgaagataaagacaccggcacagcccataacaagcggaataacccagaaaagaataaagaggaccaactgggcccatccagatccgacgggaatcagttcgtaccttaggttgccatcgtttagggagatggtccagccaagatgcgggaacggtggcagaatggtgatgttgatgacgttggatgcgagataggacggtggaagcttttgaactgaagacgagttgccgacgtcaccgtagacctcggtattatcaggagtgccctctttgtcctggccccaaacgttcagctgacccacagctggccattcgtagacgaagtcgtaggtccagcgagacgttttggaatcgaacttcatcttgctgtccattcctgcatcatagccatattggttatatgggccgttgaaccaaatgtgcgggaatcttcggactgtggtgctcgcataatcaccttcctggaggtaatcactgcttccagtgagcctcgaaaagtactgcacccggatatgagttccgtcccacttctgggcgtccgtgccagtccaggctgggatggtaatagtcgtgttgccacctgaataagtcgtccaatcggtccagctcagaccgaaatcagccgtgtatcggaacttgtccgcaccagcagctctgtgctggatgtaaaggtcatcgttggacttgtgcactaggctggtagagtaattggcaagcggagaaatcaggggattatcagaagcgccgaggcggatcaagaacttgtcggtcgcattggtgtaaactccggaagtggaaacattttggacagtcaattggtggattccgtggtggacgttcttcaggtttgcagaccatgtccaaacagtcgggatttcgccggtgaagttatggctggtggtcctggcagagatattggcgcacttgacactatccgtatcaagcacggcggtgatgtttttctctgttgtagaatttaggtaaatggcatctgtgatgctgctgcagtccattgctttggaatatccaagctcaatgggcagggtttcgcccgtatcttccgaagatagcaaccgagcatcatgtccgggatagaaatcggtgacggtagggccgggttcgacgaagttagagctcttgacataggcccggtattcccatggaagcagctccattttcctgacgcatccatagaggttgacgttgtctgccttggcggggccatcctgcagggtgagctcatcgtaaggataaaagaggttcttcaattttgtccctgagtcgaatggagccaataaggacgtattcttatcgctgcagttgcccccgtatgtgacggttgagtttccattctgatacacaagccatagagtttcgttggccaggatcgcgtctgtttgtaccgcagggaaatagcttcgcaggacagaccaaaggccagtgaccgtgggggtggtagaagaaccagggaggtagatgtcttgtgtcagttcggagagtgtttcgaggtacaagccatccatggcgaccgggtaatgcgcacggatctcgaacatgcgcttcatgatgttacgcagtggatgggcgggattccgctggtcgtacgtgacagtgatatcattgcagccatcgcgacccttttcgatggggaaatcgtagaactttgaggtgttcaagttgaagcagccttgtgtccaccacgcggtttggtacgtcatgggttgccgaccgaacatatagttcgctgcggtagcgtcaaacacgtacatctcctgctcttctccccacaagatgagagggattccaggcagctccaatgtgatgatgtacaaacccaggaggtatttatctgtgccattttggagagctggccagcggaaattatcctggttcgagacaccatacatatgtctcggatcaacttctcctgtgaatgcattgaggaaatcgttagtgatgagcatctcattccaggcttcgatgaaatcggtaggcaaatcaaagccagcaaccaggttaccgtccatgcctaggaaacgggtcatcgaacggtaaatggtatagtgaaatgcggaggcatccaaagcttgcagcccatcgtctctcaggaacgccccatccgagctgttcgtgatcttgatacccgcgcctgcattggctgtacgctggtttggttggcggccgcggccgaggtagagactgccaaagctgtctccagatgtgatctcgccggggaggaagaaatttttcttgccgagtgcctgcgcgcattcacggtagacggccatcatctcactcaggggctcgagggtcgattgcacagacttatcgaagcggaaaccgtcgatgtctagactcgcgatttggaggcaggaatgttgagtgatcacatcgcggaccggcttgtgccattcacgtagacgatcctgcacggaggcgaacttggtaagttgacgctgccagtcggggaaattaccgaatgcctcaagctctccgtattgatcgaaatcgctgttatagcaacccttcaaattttggacgcccgaggtggttaatggatatccagtctcatcccagaacttgggatagctgcaagattcgttatagtcgttaccgaagttgaaatcggcatattctcggtcggtgacccattggacttcatattcagatgctttgaaatcggcggaatcgttcagatggcctttgaatccgatgaggttgctcattctgtgttttgatcagctcatgaacatcccaagatgcgcgaagatcagagcatgacttacgttgccagtgtgttatccaccaacacatacatctcccgtttgtgaatctcctccacggtccgcctccagtcatccagtgttccataatgcatgtcaaggagggtggtatcgaccggcgagtacccatcgtaggcccagggcaagttcatcaagtacgttccggcgaagtagatgaccttgtcggtgttagcgatggaatcattaagaggccgggtccactaaccttgaatcccattccctggatgtagtccaacgtatctatcaacccctccagatcaccaccatggcgcatctgattggagttgaccacatgctcaaaggcggtcccgttgatatcgtcattggtcgggtcgccgttggctatacggtccaaaaagattgtatatgtaggcatgcgccagttatctggcgacggatgatagtcatggtccggccatgctccccaataatcgatggggctttcggcggatttgttctcgttgagattgtatttagcgagtggtttatcgtagggccaggcaaaggcaaagacgctcaaaaacgacagtatgaggaaagctgagcgctgcatttccgtatattactgttatcagcaggaacctgctgccggaaagatgcgcgactcaaaaaacgaatggatgaatttttgacaaatagcgagagtaagatgagtgaaagaacgaggaatcaactgaaacaagcttccagcatagtgatttgaaaggttttacagaatacaatttttactaatgttgtatggcgaatacatatttttactatggagaacacatccttatcgggccgaacggatgggtggcttggactatacatagtcccgtccactacgacccaccaggtgagattttatctatccactggcttttcgccgctgcttggctgcttttcgggtccatgtctcagatagatccaggatttgagtcattatgagcaggcgaccttgggttgttgtggtctaagtgcgcccaaccaaggactttaacttgactatgtctgtagtatgtgtatattatgtctatatcgatgtcttgtacacctcagcaggagattcatgacccgaagatgggcttatgcaaagtgcaattcttagccatacagctgcatcagcacaccgcatcatcgcatcactgtatggcaaaaggcttttgatgtacctaggtccaagcacagtacttcgtattcttttgttcttttcatattgaagtgtatctatcatgcaagcaactggtaatcatcgaagcttatctttgtaattaattaaaagggtttaatccaagctattcgattctactccctatagtactccatagacacgggacgattagatattgtcaaacgaggctatcacttgatcaacctggctctaacacccccccaaaaattaatgaaaaatacaccacaatccaaatgtctgagagacatcctgtttaacccaggcattcggttacagggtggtatattggtgggtttgtttccattcggatccgcccgccttcgacgtcacatcttggctgaccggccttttcgaccactatcgccagaacgtcgccagtgtgaatcaggaaataacccactgtaagaacttggaattcctgcccgtttaatatatgtcttcctgctcttggtcctcccagcctgcttcagatgtcttcccatgctccgattaataatctcgtatcccgtgtcttagatagaaccgagcaaacccaccctcccatatgtacctaacaattcgtcaccccctcttgttaagaccccggagaaaagtcttatcccggggactctatgccactaatgcagtgacggggcgtgggcatcgtatagaatcatgatatttgcttttgccgccctcaggtacgtaaatatacgtaagcagcgttatcatccgtggatgacttgcgcggcccagacgtggttctggatgcatggcttcgacgctttcttggtcgtattgacaataggggtttgaagcttattttatctacttggtaataccaagcgaacgcaacgttctaacctctactgtatatacacccggcgatacttgatgacccgatacgaacgtaccgataagagtagcttaaatatatcgagtcttgctatatatagccgaaggcgataaagcattgattggaccatgcgacccatatgatagctgtctttgaacgcctccattcagagtggagcacggttctgttcacttaattcgaacaatctgggtgatactcccatggcctgttcagaaacgcgctagcgcctatttgatctagcctggggccgatcgtcatatagcgtgaggaaatgtcttatgtatgccacgctggagcctatacggaggatggtaaaagaggatgatcgtggcaagcccaccaacccaggcccaccctagttgggggcaccaccggatagccaattttgggcaaattttcaccgaccaagttgtagtctcctttgtgtgtgggtttgccacgatacttagccctgccattactccagttgcctccatcccattactttgccctaggcattgacctatgagcaaactcggatatccgaagttcccccattgttcggttcgcgggcttaagtcggccgttccgacaacctgatttcaaaaacgcatttcggtgaactggggcccgaggggtatcccgtattgtgccggggtttggagggatttggccaggtgaggctgacaacaggcgtgaatggcttatttaccattggctgatattgcctttcgcctgactctccgccttcctaatttatacacacgatagatctgggtacccaatctccgattcacgacaactataccccacataaccagatcttcttcgttcgcacgcacatctttctttgctcatgtatctttataatatagatgccccttacttgaacttgacgcatttcaaagacgaggttacctctcgctttgattcaagaccacacacaatactaatttttgggcacttgaaaaatctttcataaaagatattaccatggaacaatacaaggcctagacacagtccactgggtcaattgttgccttactgccggtacctgggcctggggttaaagaccaaaccccaagtcgcccgggctattccgtactcggatcaaaacacccttcgcggctagcgcggagtacaactttcgaaagcatggcgcatgagaagctctatgtagttacacaggattcttgaccagcctataggatcgtgcttgtggacagtcataatgcgaaaaccgcttcccagaacggcgaggtgcataaccgattgcatacaaggcatgatatatattgcgagaatccacaaatatcgcaacaatctatgaaaatcagatcgtggggtctacggacatatccaaattcgattagtccatggcatacacaatatgcttcatatgcgccccctccagggctaatgccgtacaacatgattggaataatataaagtcgagacatcttcttggaaatcatcatgttcagatcaaaattcagattaattcacgcggaagatggtgtctcccacatccaacatatccgagcacctgctcttgctggtgtacgtcgtacttgcctacacaggcatcaagataatctaccgcttgtatttctctccactggccggattcccgggtccacgcttggcagcagcaaccagtctctatgagttttatttcgacgttgtgagaggaggccagttcatgttcgagctggaccgtttacatgacaaatacggtcctgtcctccgcatcaatccctacgagatccacatcaaagaccccagcttctacgacactgtctatggcgggccgctaaataaaagagacagagtgcctgcgtttattcactcgggaatgccccgggcaaccttcgaggctgcgccacataatctccatcgcgagcggaggaagttattgagcccgttcctttcgacgcaatcggtgacagatctccagcctgtcatccaggagaaggtggatttgatctgcagccacctgtcgagaagggtcggtacgggggagttcctggacttgcactctatctttgcttctttcgccgtagacgtgacgtctacgtatgtgcttggccctacgaattgctataactacttgaagaacacagagatcacagacgaatggaagcaatatatcaccagcatcttcgagggcctgattcttctcagacatcttccattcctggtcaacccggcacgtgcttttcctaagattgccaccttcttctttcctaccttcttctgggctcaaagatgcgaaacggtatgtatggttattatctggaatgcaaatatactgatagaggattagaaaatagatagaactgttagggctgcgtacgaaaaaccagacgagaagtcgatgttatcgactattctctccaataagaaactgcccgacgaggaaaaagaactcgaacgcctagaacaggaactgaagtttctgatcattgccgggactgacgcgccttcccaagtgatggcactcactatgttccatctcctttggaatccagagatatgccaaaaactcaaagacgagttagatgaggctttcccggttctgtccgacgcggactggactaagttgaaatatcttccatatctggtaagcagtatcgatccgtatttttttcatggactttattaacaacgtgcaagtctgctgtattgaaagagggtctacgaatttctgccgttgtgacatcaaggcttccgcgtagtgcaccagatgaggctttgcaatacggaaaatggaccattccacctggggtatcttgtactcagtctaccaatcttgttcctggctaacacattgctctagacacctatcagcatgaccacccactccattctacgaagtcccgaagtctacaccgagccgatgaaattcatcccagaacgctggatgggtcctcccgaggaagttcgcgtactggatagatatctcgttccgttcgcgaaaggcaattcaagttgcatgggtcagaggtaagtaccttccagtctcttaaccagttccagaccagcggcactgatatatactagcatggcctactcgtggctgtacgcagtgataggtaccgttgtccgcaagttccaattggagcttcacgaaaccgacgagaagaatattcatattgttcgggactgtttcaatggacagacggtccctgggctcaatttgattaatgtgacagtcgctaaagagttcaactagaagggtctgcatgtgaattatcggtctgttttgcatcttgattagatttcattctgtcatctctcggttcaactttcccccctggcacttggaattacctgcttatgctttgtctcatagaagaatagaagggccaggaaacagacacaagactattataacacgcattagaaaaaagcccaaatcaatatataaaacccacctgacatccccaactcacattcaccagtccctagactatctatcccctagtcccaaaaacataatcccgatcaacagccagccgcccagccccaatctccctctgataatgctcgacaagcccaataacgataaaaacccagccgcgctgcccaaggtccttatcacaattcatgacgggaaacgagacatacagctcgcgccggtgatgcatggcctcgtagtgggtgatctcacagtctccagcgcggcaccggtcagccactacgtccatcaactcttcgtcggagaagaggtagtctgtgatggatagcttgactgatacccaccacaggtccgtcattgggctgaggttttcgtagtggggctgtccgtttgagaggaagattgtgcgtgtgtgccttagggctgctcggcgtcttgggcctatggggttccaggattggggtagttttgatctgaacatggcttgatggtggtggggtggagttggggtttgggttggtttggatggaccgtcgccgtggacgtgatggaactgcttcttgtctgatggtgtgtagacttgacgagggattccgaggttatttaaatgcgatgtagtgagacagtggacagttctatcgagagactgtctttgacatggttgggagagaacaaagtcttttatgtgaggttgttaacaatggctttgttggtctctgactagttaggcaggtactatgacaatgtgaaacgaacaaagcctcgaagcctttcactgcttatgattcgaaatcaaggattcaagaacaatgtcgatcagcgctttcccttaaggagcttgacattcgttagtctgacattcagttcttctaatcagagaacaatgagatttctctgatggtatcgatcagttcacactagacttagatagtatattgatgtcaaacctagtagatcatccattctccatcgttgaaagtgaaaattttatgacttttaaaaacgtctgatcttgctgggatggaagtatccagtatgcagctatgtaagtctcgacaagattacgcagtttcaaaggtcatacgtagaaattcgtcaaatctatgctttttacttgccgtttatgaaacttaggaagaagatatcaaaagaaaaaaaaatctaacagactaatcacgtcgttctcaaaatagaacgcggccgagtattcttacaatgaagaggtcgtgcaagaagaattgccgattggacattgttttccacgttgccccaggaaaaaaagagagaacagatgccaaaaggctagccacaaatacaaaggaacataaccagcatgaacagagttcattaatcgtacctggataccgcgtaggggttgatccaaataaacttcgatgcgtcattttaatgcatgttaataagccgaaacctctgccgaggtccagagcagagcctccaataccactactcaacgtagttggcagggaaaggtcccttctgtcctctcagctcgccttcccaccagtcatccgtgctatcggtcttccgcacgacgcggatgcggtcaccttcccggaaactcagatcgccattcccctgtccgtcaaagtcatacagcgccgtgacaaacactggacgggatgacggcggtggtggcgggggttttttcttccctatggcggcagccatgggtgataccttggcctggaaagagtctacattggggccggcaggtgatctgaccactcctgatgaaatgggagtggcttgtggggttggcatgaatgtaggacgagggggctcgaagtagtcaccgcccgttgcgaggggcttagatcctgcggcgtttccaacgggaattgcgctgctcttgtgactgagcgttgacaggggcggagagggaggatattctggtacacagggtgtctgggccgacgatcctggtgtttgtgagcctcggcggtaagacgggagcgaggtcgatgaggcattgctaggagcgcggcttccaattgaagggcgtttcttattgtcgtgctcggctgcagctcgacgcatggccttgccaatggtcagggagccgaagttttctatttcagtttgcacaggtttgaaggcaaactcccaatcttggacaacttgttccatgtctggtggcggggaggggaatccctcttctgcacaataagtgtgaaggactgtgtaatagtttgcaagcatgcggttttggatctcgacctgtgcttcgaggaaatatggcgtcagggagaatatgagagcgattaatgttgggagtcgctgtcgtaggtcctcgtcggcagcttggtaagcctggatggcgattagtgtttcttattctatgaatagtattgggcattgagattgtacctctttcgtatcggcaagttctgcctccgctttggccaggttcgcattgtcgcggtcggtgcgctttggctttttcatgaggctatcaacacgtccttgggagatttcaaagtcggtctagaattgggatattagaactaatccaccaagaacgtcggtatttattgtgtaccttcttgtcgtttcgctttttgatcgtctttttcatcggcgcaagggattcctttgcctgcgaagccggcttggtcatgcgagtatcgacagcaccgagttcctctatgaggtcgttacgtagttcatcatattccttgcgcagtcggtttgtccgagctaatctgacggggtcggtatccacggcgttgtggttggacggggtttctgaggaaccaatgataggaccgtagaggccgtcgaattcatcaataaggcgactctggtaagttgcgatagagatccaagcatcacgccaggattgggtagattccacgatctgattaaataacacgtatcaggaaatgcgacagaacgcgcgtcatcggggtaacattgtctaccttgcctaggagcatatctgcatcgtcgaagtcttttaaaagcacagcaatttgactgtcatctgcagacgacttcgtcgtcatgcgaccaaagcgtctcgtcatgttctgcatgttgggcgatgagctctcagaagctggggaacgcggaacgggaagagaggggatgacagaagcgtgtttgaaacaagagtgaactttaattcaagtcaatattaatcaatgtattcaattcgtccacatccaatgcaaatgcaaaatgtagatgatggggaagaaacattgaaagaaaggaaggggaacgtcccatcccctcatgacacataactcagccccaatgcgtttcagcctttcatgcggctcgtgccacgacccctccaacgtatttgacctttcgggaaggagacaatgtcaatctcctgaacccttctccactctggatagatcatattaaatccggttatccatcttatctcgtcgatgcggaatactagtatatgccctacagagtacggagtacggtgaggcattatagtacttactacttgctcataaaatacagtataacatacacatattccgtacaagaggcgcagatataaacattgaactctgggaatcgacgaatccatccgtggacggacaaacttaacctgctgagctcagaactctatatctttcacgtgatccggatcttcatttatagttgccaacgtcaataaccagttaatgtaacaatgtcgtattcgtgttctcttcggtcataatccaatataaaatacggagtagtatccccgatattaggcaacgatcaatagctctttctattccgggtatggcgccctcactcccacccccatttggtcctagcctcacccgttttaacagctaaccgtgccaagcgcccaacacgcacttggcacggctaggccgctcgccctacggggtacctttaacggaccgagagaatgaaatcccacctttgctacatagaattggggttgtttaacgtgcaaggtgaatccagtcgagaataccttatctcgttgtggcatcgtataacgcccaagtctggtttccaataaggaaaatatcacctattccaatctaaggaatacaaggttgtatagcaaaagtaatccacaccaaacaattaatttccacaagtgagagtttttcctattcatccaatgagaatcaaactccaaggaaaaccacattaatcacgcattgttcaagccttcatacggtacctatacaattggcactcgaagccaatcttcttaggctcacccgaagaaagcaagtcaagaagtccgcgtttctccaggtcttggcagagttcctttttcaacagaaattcctttctattcccttcctccctgtgtcccactctgctacttccttccgcttcagttccttcgttcaagaaacgattcgtgtccaaagctagatcagagactttgccatatttgttatgccaacatttgtcgatgatatcgtcaatccgtggattgccattcaattccggaaactccatgttctgtagcaaatccacggtcttaggaccatgttcgtaggggtcctcggtaagacagcgatctctgtaaacctcaaatccgtagttgatataatagtataaagaaccgagggcgaactgctctgtccgcgagccaagggagccggaacttccacaaatgccttcatccggttcgttgctattaaggaatctgccatatggacctatacaagcttcgtgatccattccgattttcgccgtgtaatcaaagtcggataatttgagtcggtctcgattaagtagaatattttcaggccgtagatcaccgtgagcgaggttgagagattccaggaaagcgacggcttgagcgagatcgtttatccattcctttcgtagggatagcggttccaacttttccactttagtaaccaccatattttgtcggttccaagtatggttatcctgtattctagaaaatagcgacctgtctattataagtggttagaagataaacctatcagctagtgataaaggtcacacctctcatgtactcgaggaagatgcctttgtctgaaatatgaaaacattgcacgataaaggggcaaggcggattttgtgagaatatgcggtatatctcgacctctttgctgaattgttccctttcctcttctcctgactgcgggaccttgaccgcaatgcgagggtcaacctcgtaaacgaaagagatgcctcctttccagatccagtggacactagggaattggtcttttatattcatgacgaaaatataatgtgtaatttgactgtttggagagcaggacagaagcaagtgtttcctgtgattcaaggggaggtgagcagaggggaaaagcagggccaggcacagctgaaccatgaaccaatgatgatgactcccgctttccataggcccagccctgtctaattgtaatcgaggcggatgcgctggctagtgttatcgttacgaatcagaagtctggaacatccctgagctcctgccctaaatggcgtagcagcggtcatgcccttgtaaattgttgggattctatcaacacgaactaccggcatttaggcttagtacttttgatacaactttgctttctctgcgctcatgtttgcactcagcatgactgcatagatcacttatttcctttcgcccgagagaaacagtttatttaactattgaaatggaaagcgagtacaacatacgaagtatacggatataggctcagtttccaggggtttgcaatatcaagttttatacatactattcaatttacaacaatcccaccaaaacatatactatgtagacttagactttatatctacagattcaaaaaagagtataacaacagaattacagtatgagttctaggacgactgaattctgggcatatacaaacgtcttgtcgtgatgctctcaaagttccgcttcatccatcttcaacaaacctttctgccaccacttctcctcctcttccacggccgctatccgactctttgcctgccgaaatccatgtccctctccatggaaaatcaccaacttaggatgacgaccagcctttttcatcatttcgaccatttcctctgcttggttcataggaacgaccgtatcctggtctccttgaagcaataacagtggcgcagtaatcttatccgctttgtaacagggactgcgttcgcggaaaatgcggtttttctcggcttcatccgcatcaggatcgaacaacagggcgaatgcgtaatggctctcgaacttgtgagtatcctcacagagcgccttgacattgccgattccgtacagagaattgccaccggcaaacaggttagggtagtcacaaagagcttggagtacgatgtatccgcccgcactttggccgcgaacaccgactccgttggggtcaattcggccagacgatgccaggtatgacacacaactagcagcatctgctgtgtcgaggattcctaataactttagtcagcattggagggaatggaataatctgccatgagaagagtgaattctcaccccattgtccattcaggatatcccggtatgctctgccatatccggagctacctccgtaatttacccagacaacagcatagcctcgggaagtccagtattggtccgtgatatttaggccagttccggtttgcgatgttggtccgccatggacgcagacgatcaaaggcggcagcgctccagaaggtgcttgataatctgggttctgaggtgggtagaagatggcatgtgccactccttccaagctcttaccgtggactcttggaaaagatagatgctctggcttggaaacaagagaacttggcatggggagctcggaagctaccctgagtggagtgagcttgacggtatcggcgatgtccaatgtgaagacagtgctgaagcttgtttcactggaaccaagaagggcgatttttgtgtctgagagggggttatctgccaaaataaccgtgtccgtcactggcacattcaggtcttgccaggtatcattcgacagatctatcagaatgaagctccatcgagcattcttgttgtacgacgcgatcattagagttggagtcaaacacacgtatgtgcagctgtcaaaatgtaggtcagtcatcaaaccagctgcctcctggggtcaagactcaacgtactttcctagacgccagtctggctgcgaaaattctacctcttccaggccatgcagggccacacgctggctttccagagtgtcaaagttgaaccgatagaactgccaataccccgaaacatcgctcgtgaagtacaacgtgttatcaaggccccatcgtggctggctgacactttctttcttaggcacaccatgcacatggtgaacgtctgtgacctcaccattgttccacttagcaacatacaggcgagctcctgtccaaggcatatctggatgagaccactgggtccagcatatcttgctgccatcgggggaaaactgagcagcactgtagaagtcgtcgccggaggcgacattgactatctttttggactgcacgtgtaccgcgacgagtcggttccgaacttccgccggcaagggcttggagtggtcctcttcgatcgccaagagccatcccgagtccgcctgactatctgacaaagagcctatagcagaggtgcatgcatagcggagatcagtgcctgtcgtggtaagctgttcaacaagaccggtggagggatcgagtttgtgcaaatcctgtgtctcccgatcagaaaagacgacctgtccgttgaaggcgatcatcgatgcgccgccatattcatgaactttggtgcgagcgtcatatctattggactttcattagagctgggttcatacatggctagatctagtatgtacttggccggtaagatatcgcgtccttcaaggccagagtattcaacgacgcagcctcgtccctgctctccgggtcgaccctcgatgacaaaaacctttccgttagatgtctaaaggcgccgttaaaattttgggcatgagcgaaattgaggtttattgaacataccgcgatggattcaaactgaacaccgctagcgccaagcaatgcagagctgattgggctcttccattggccgaacggagctgtgactggagtagccatggatattctagcaatagataacttattcgtcggattgatcgagttgatagtcctgttgggaaagtataatggtataggtgttgtcagcgttgtgaggcgatggtggaaaacagacagtctaccccgcatagcctgcaacatagtgaggctggctgaaagttcagctgagattcaattgaaaacgaccagtaataaataatgcaggtctctagttcaaatcttcttttaggcattcacaaatgactcttgaatacctgtctttatacctacaacatatattttccaagattgttgcctgaggcctctaaaccctaccttatcagcttatcgtttccactttcaacgcgaaacaacgcgactgaaaccacatttcgcgactccatgcgatgcgggcatgatcaaattagttattccacaatgccacaatgatttccacaccgtcttcctccacgcgtcctcctccgacctctccgcaggtcactgcctcggtcgtgaaatttcgctgcctgtacactcacgacttacgccgcaagtccaaacgatggcacgacggacacttacgataccataaacacaacaaacgtgttatggtatacgatgaccagggtaattttatcggtgaccaccactggcgatccaccgatgaagtacaagatggcgacgaaatggagctggacaagggcgtcctgattgaggtgaccgagaacatgggcacgactgagactgatatcacaacactgtacgaaaaaaagaaatcaagccagggctcgccgccggccagagacccgcgttccccctctacctacacgccttccgcctccgtacctcttcgcggttcccagtcatttcgctcactttacgatttgctgggcattaaaaagactccgattgggcatttgatctccccgcacgaggaaaggaatcctccgcaaccagcctccagcattcaggaacccgaaagagcaccgaagcgacggaagacatcctcggtggtgaatcgaggcgagcaacgctcgcgtgtgggtgaggtgatcgatttaaccgattcaaccgattcagttcagggactctctgagagggaaaggccgaaacaaccgaaaaagccacatagagctgggggtgattctacggctgatgcagcactcccggtaaatcgtgagcagaggtcgaaaccaactcggccacagagacccaatcctccttcgttctcaagcgcctccgcttcaactgcatctgaaccgatctccagtctaccaacaaccgaagaattattccgtacacccgccaagggtttccaacctgcaaggtcactaggcaataaatcgaaagatgacccgccacctattcaaccgccaaggccccgaggcccctccacaagttcccttcccactgtaaccccagaaactgaaataccgaggccacgggagaccttgcgcgtggagcagccatcaatcagccgcgaaaatcgatcaagagctctgtcacgtcccatcccaccacagaggtctgaccctccggcggcttcgaggagctctctcacaagcgcacccaaaccgtcgtctgctagatctacaccacagacgccggtgcgtgcagtcagcaattatgtgaaccctatcgaacctgtgtgtaatcaagcttcaatcaacgttccagcatcagtcaacattccacctccagccaatgttccacctacagtcaacataccatctccagcaaatatttcatcttcagccaacattccacttccagccaatgttttacccacagtcaacgtaccatctccagtcaacatctcatcttcaacgagcatgccgcctccatcacgtccatcatcgacactacgctctggggcacctacatcctccctacgcatgggagtcgggaagccacgcaggaaactgatgtacagtgctctattgccgggcgcttcacgaactccatcgccagcgacctcagatacatctcctggtagtgcaagtgagcccgctacaaataccccagagcaacagttagtacggtacccacccattaaccaaaattgtgatactgattctgtgcagactggccgccgttccaggtgattcttcgatatcaaacgaagagtttatgccctcaagctcgacacaatttatcttcgacgagatgatagatggatcagggttcaaatcgccctccacaatcaaaagcctaaccgggaaaagatctctgaattcacccttgcgcaagtcgatgtccgacccgattgaatcgactacccgccaggttcgagcaggaggaccattacacgcggctaacaaggaaaacgagcccagagagcaaggcccttggacatccgaggccttggatttgtttgacttctggcctgctggacgaccaaaaccaaacgaatgaattacgtactgtggctcggtttgagagctgggcatgaggttctaagcaacaatgagtagggttcaaaccagattgacaacacaaagacaagagccttccaaggttcttgtacctcacgatgtctaccgtcttatgggaagcaatcaccaagtcgccgaaaccgttgttctcgaaaactcagtgagttttccgtagtgttcctgcgagggataactacttttcaagatgccaatcacaagtgcacaccttgcgaaaacagtgcttgcaattcgtgtcggggaaacccatgcattcatatccacagacttccttccccgcctctctccccaatccgtcagggcttatgatttagaatgcttctcttcatgaagctttatgttatctgtttgtccgaaacaagccttcgagacccagaacgacctcgatgctcttattgaaacaagggaaatatgatagaacaaagatacccatttaacattgatgaaaaataaatctatacctaacgcacaccaactcatcgaacttaaatccccttcttaaccaaaaccccagaaatataaggcatagccgaccactcaaagctcctctccaactccaccctctcccaccccccatccccatcagccgcagccctcaaaacggcttcagtatccctatccagacaacaatccccaataaaccaactccacccaagaaccccatacaaaccctgcacaacccgcccaacaaccgaccccttcgctcggcgccacgggttaacaacatgctcggtcacaagcaaccgcccaccaggcctaagcaatccatacaactcccgcacagtcctctccatctccggcacggagcacagcacacgcacgcacaggatcgtgtcgaagattcccgcgcgcgcgtcggcgtcgtacgcgtccacgacgcccgtgcctgtcgctcgcagggcggggatcagttcgcgcgctgctacgcctgtcggcacgatgtggtacttggcggagatgttctctgctaatgcttttgcgcggatcgaggagtgcaggcttttgcagggctcggcgccgtagagcgctgttattgagggtgaggttagtaggggcatttgggtgccggtgcctgggccgatgtcaagcactatccctgaggcggtgcggaggattggggggattagggctgaggagccgactggctcggggatttcttggttgtttgggtcggagctcatttggcgggaggctgttgatggtggtttggttaggagttgtgttttatgtgtctttatgtattctttataggacgttacgtcttgcggtttttctcgttcatcttgtagagatttctaagagcaagaagctcccctctgggtttgttgatgtgtggctgggactcactggtgaactcgatccagaatcttccgaatgcttcatcgcgaagtctctgggtctgggtaattggggcgaagagctggccgtttttgaagactgcttcggcgcagactcgaatgtagtctgtattgcagttagtaatgtgtaagtttatatcagatgagatattggtgctgatgtgcggagaatgtccaacaatataccagacaaatacagggagattcccaaaagaagaaaagacgatacgaaaaggaatacagcataaagtaaatacaagcagagtgcggattgagagcacatcgatcggcgtccaattccataattgatatcatagccattcggcatcagttcgacggctgtacttacgcgacatcgcccaagtaaggatatatgctggctcgaacattccgagcattcgcccgacgaacggtggggggctttcggttgacattgtagtcagagatgttcgaaacccgatttcgccaactgcaatggatgctaagaggagaaattacaagaaaaggtttatatagttagcggaaatgccccacgtgactggggagctttgtggggtcggcgataaagtcacatacttagctgactagggctgtggtctgaagatgaccaatgaatgaatgacaatggcgtgattattccgatagataattataatctcacgatcatacatcttacgagatgaaaagtaatcaggcttaatccaacaaaattgaacatagactagtatctagcatcctggattggtgcaaattgcacaagtactcaacagatgctccggaagaaagagcggtgcctatcagtacaaagacgacggcatgtagtggtcacaaggattatcacataaaaggagattataaggaaatagcagactcagattgggagaaacgttccagaacggaatgattgaacgaaggacagagacagaacagacacagtaggagaattgagatctgtagagagcaaaaaaagaaaaagatcgtatgtgagagaaagcggaggaagttaggtgaacctattcagggggtcggagcgaagagtccagaatcaccaatgagtacatgagtctcggtttgaggtatgagggattccacgctcgtgtgaaagaagttaggttggagacactattagaagggttgctggttggacaagagacaaaataaaaggagactcgtcgtcattatctttataagtgactcgagtccgggttgaggacctgcccacaaaccctacgaacaaatgccaatctcattggatgttcagcgatggtggggtgagtgcatgcggttgaccctcgggctgtaccgactggtgcgagcaagggagccaacgtcgtgttttccgtcgcaacaggcacggacattttcaagccggtcttgctcctgggtttcgatcacttgtctcagatcatcggcactttcttggccatgaagaatttcatcgttgatactgggagattgaccgtgccgtaccttcagacttgcgatggatccccgaatcgaacttgagatggtgctgagtcttgacgaagagcgttggcgatcatcgggaacttgcaacgacgagtttggcacgggtgagctgagcgccggtgatgcacggccaccgagagtcccggaagatcgcatggacatcgccgaggccgctctccgctgttgcttggatgcatgacgagcggtgcggctattgtaagatgagaacgacagtcgtgcgttctgacgagagctagaccggaagcttggggggttgaactcgttgatgtcgtcaagggatacgctgttattgtcctcacaggtgtcgttggtctcccttagaaggaggtaagacaacgcattgaaccacgtctcatgcctctggctcgttgtagccgtaaagcgaactcgtcggccaggactgacaacctccaagctcctgcagtgaagacccggaggataggggttgtcgtcggcaaccactcgaacagcctcaatgggcacactcttggtacggagctcagtctttccggcagtttgtgggtcctgcgtactccaatacagagttcgggtatacgggtgaacccagaagtatcgtcggtgccgtgttgtggacatatccgacgagccggtcttgcgagtgtatttccaaaggaattcaccaatcatggtctgagtaatcgcctggatcatgcgcggatccgtattaggtccatagccctgaggcatggggccaacctgaggggccatattgaaacgctcctcgagctcagacgcaaaagacgagactgaggatcgtcgagacatctggctttgacttcctctcctcattctggcctgggatgaaccggttcttgaagagcttgcccgcgcagcgtgttcgcttggcgtaagtgggcgctgggagttcatgcggtaggcagaggcaggtgccaaaggaggccccatgacagacgtaggggatggcggagccacgtcgatggacttcttctcggctgctgtgatagcttcccggtgatcgaagggtagtggaggatggctggcaccagatgtctgactggctgaactgtggggccggcggtaacttggcgttgttggtttcgcagcctgtatttgcgaaaggcgaggtcgcgtcggagccttgggtggtacatgtggagttgtgatacttgcagtgactgaggcaatctcccgtgagctgtccgtcacctgactgtcggaagacagcgggcgtgcggacacgcgatccatcaggatttgatctatctgtttagaggacaggatagtctgggatccttggtccatgctcactgaactaggttgctgtctaacagagcgaggtagggcgttgccagagatatcgttcaaggccagtccagcaccagcgagctgatcactattagctgtgctagggcggctacgagtagcgccaacaggctgctctccggggaccatgatagcggccccagcctttgactctgtcggctctgtttgagtagataaatctgccaccgcagggatgacaaatggcatagacttcgctggatgagtttccacagagcgcacggaggagaatgagaattccggcgtagggacaaggcggggctttggaacaataggcttcgtatatgctggatcgaggcaagagatcgtcaagttcggtacttcgcgctcacgttcaacgtgtttgataacatcgacgtattgaatgacaggtggctcgggttcaggaacagttgcttcgactggcgtagtagattgagtggtgatcgaagagaaagtcaattcgggcacctcacgctcacgctcgacgtgcttgataacatcaacgtattcaattacaggctctgctttggcgatagttgcctgcacaggggcagtggactggttgttgatggaagagaacgtcaactcaggcacttcgcgctcgcgctcaacgtgctttataacgtcgacgtattcgataatcggctccgccttggcaagtgttgcgtgtacaggcgcagtggactgagtggtgatagaagagaagcttgcctctggcacttcgcgctcacgttcaacgtgcttaatgacatcaacgtattgaatgactggcggctgcggttcgggaacagttgcttggactggctcggtggtttgagcagtgatagaggagaaggtcaattcaggcacctcaggctcacgttcgacgtacgtgacgataggctccggcacagcaagagttgcctggacagggacagtcgtttgattattaatggaagagaagcccaactcggggatctcgcgctcgcgctcgacgtgcttgattacgtcgacgtattttatgacgggttcaggctcaggaacagttgcctggattgcctggacaggtatcgttgactcagcggcgacagaagagaagctcaactctggtacttcacgctcgcgttcaacgtgcttgatcacatcaacgtacttgacaacaggctccggcacagcaagagttgcctgaacagggacagtggaatgattattaatggaagataatgtcaactcggggatctcgcgctcgcgctcgacgtatttgatgacgggttctggttccgcaacggttgcttggataggtactgtcgactgagcggcgacagacgacaagctcaattctggaacttcacgctcgcgttcaacctctttaattacatcgacgtacttgatgataggctctggcacagcaactgttgcttggacaggggaggttgattgagtggtgatggaggagaatgtcagctcgggcacctccggctcgcgttccacgtatttgataacctcgacatgcttgatgattggctcaggcacgagaaccgttggttgaatgggatgagatgtttgtgatgaaattgaagatatcgtcatctccgacacttccggtgcgggcaggacatgcttcaccggtgcggtggtgcccccggtgatgtatgcgacactcagatcaggccgtttaggtgcggaaggcgtggtctcttgggaagaaacgtgcgctatgcccatttcgggtagatcgggttgagcgttgacatcgtcctgctggtcttgaaccgaacgatcgcccacaagcatgttttgcggggtagaaacattcgatgggtcatcggatgagggcttgagtggagtcgcctttgtttcctcgccgatctcccggtctgtttgagttgcgtcgggtgcaagagcatgcggcagagcagctcctgcagcaataccgacagctccagcaacaatgctagtactgatagacgtgggctcccaaggttcagtcataacaccagaatccaccattgcgggcttaggtagtgcatccagcattgcatctgagggtctgcgtgagcccgatgcaggctccatgcggggtgtcgaagcctgggagtttacttcgtcatcatcaatgtcctcgagctctccaagttcggcaaagaggctctggccctcttgagctaatggcagtggcgcaaagctgggtgctgcggattcgcgtgaactcgaaggtcgactggttgatgcgaatgtggcctctccagatggacgaatacgtctcacgctacgtttagacttaacacggggtctggaggcattcctctggctcggagagtcgaacactttatcatactcttcctcatcggaagatgcggaagcagtgctgttatatgagttgcggttgcgagctttggccaggagcaggggagaaggcactcggcggcgaggagtggtctgtacgttttctgtctcggtaagatctgccgaatcgctgctgtcatccgccatgctttcgacaccagtctggaatgcttcgctctcagttgcggttgccacctcattcgctgtttcaaatccatcttccgcctcggtggctgtatggtagacgtcgctaggttcatcaggagactgcgagcgagagcggcccctagtggataacgccttggtgtgggtctcggtaggactgatttggcccgcattgtcttcccaatcggtgtcattaagctcaacaactgatttctctttgcggcctgcgcccaaaagatctgggcggggaggctttcgggacggctccgtcttcgtcttctggcgtttgctggttgcgtttaccgtagtgctctcacggcggcgttgctcaacttcatcccgagcctcttgcagcatgcgcttgagctcaatcttttcggtcttctcgcgatgaattgtgctcttaagactctggatcatgcgatgagcatggccgagcgagctcttcaatgtttccgattcaagatggccatggcgaggggtgaacttgttgggggacggtggcggagagctttcaggtgtgatctgctcgggctcattgtcctcgtcgtcatatgcaatatccctcgagttctggttttcatagtctcggagcctcatggcaacggccttggcgagttcttgattttgagaagtcatttctaagagcttcttttggagcgcggccttttccgcatcgccagaagtcaggttcctccgcaagaggtggatttccgcatcatttgccttctgcgtgaggatttgatcctcaagcagcctcgcattggtctgccttagctcctccagctctcgttccgcggcgttcttttccgaattcgacaatgtgatggtagtgttgagccgttgttcacgttccgcggcctcccttgcagctgccataaactcatgtgcttgagtctccagcgcccagttctcgtccttgtagcgttgctcactgtcgtcgagcgcccggatcctttgttcataaccctctgcctccaactcaagtctggacttttccaaattgacaaacttgagtgtctcatctcgttctgcgagaagagcttgcagttggcggacctgggccaaaagtgaagtggagatctcagtcgcaaattcgatatcgtggacacggttcgacggttgattgcgctgcttgcgggatggaacgctgactttgctaggggagtttgtggcttgactggcgaacaaagcggaatttaagggtgactatcagaactcgatgttagttcggttagagttagatgtaaacccaggcagtaccttttgatcgaaagatagcgttccaagttgagcatcctccgggcctccggcaagacgtttgggtcctaaaaacgctcgtgctgactccaagccgatctcattgtactccttttccaaatctgccagtttgcgtcgcagttccgggcccatctctccctcattctgctcctgctcaacctccttcaactgctccgagagctgccgttgctgatcgataagggccgttcctagccttgaggcctcctccagacggcgctccgtctccgccaagtgggcctcgagggcccgtttagcttgtgctggtgaagacgcattcaggctgtataactgactgtcaaagggcgagtatcgattggagtcgcgacgagcagttggccttccggaattcgcaacgaaggggtcgtccatggacgcaaatggcccgatggcctcagcgttggatgtggtcattatgtgggaatcaggggcctcgaacggcatctgaatcctcttaatgccgaggacacagttgccgttgagatatcagggactcgcggcttgatcgttgttatgattctaggccgcgggcattatccgaatcgccgcactctgtcaaagttgtcgcaagacgctttccgtggaggtctctgccgagccgaccagcgaccaaaggttgttcagggattcgggattaacacgctgatgttgatgcgatagtcgtcaaacggtacgctgttgaaagatgtggaagggaagaggggggaagcccacacgattaaaaataacaaacaccgaccttcggacgaatcagtgagctcccagtgagattggccagatacacgcgcgcagagatgcaactaaccacaacaaagtgctcgggatctgcaggacctttggaatgggccccggtctgaataaacgaaagactaagagacaaagggaaaacagaaggatagctacctaaaaaatgaagggaaaagaaggaaagggagcgtagggagtgatttgacaggtcgagtttggatgactcggcgggggagaaaagggaagagagtacggagtagagtgaacgtggtattgttatttgccaattattggcgccggcgtttgagattcacgatcgatgatcaccccatacggagagatcaatctacgatactaggctatcttgttttccctgaagggacctttggaatttactatgaaactgtaaaaacatatgaaacgctgattcgacaggttcctgcgtgtgtttggctgccattttgctatcaaacgcgtcccaaagtaaggggggtgtttgtcttgtttgcatcggtgtgcttagtcatttcatcgcctcgactttggaaatgcgccgcatctttacaacctttgcatctgacacgattgcttgatatactcgactgaccttcaccaatatacaacacacgatgagcgaagaaacagaagtcgcagacgctgtcccccaagtcgctttcaagaaacgctccaagggcaaagccaactttcgcaagaagcccgcgacgccacctccagcttccgactccgattccgactttatatcatcagatgacgaagaagggcggcgaatcaagaggcgacgcaagaatgcagctgtcaccgcatcatcgacaaatgcgacaaggaaacagcacacagacggacctacagcagcggttccggctccattaacctcgagcaacgatgccaccaaagcttccgactggtacgatgagaacttgagcgagaagaacctattgggcacaacccgggcaaaaccagccccctctacctcacagctagacggaagctacaagggcgccgccaactatcaatctttcatccagaagaaccccgatgcaccggggaaattcggtcctgtcaaagctgcgaccaatgttaggactattacagtcacggattatgcccccgatgtgtgcaaggattggaaacaaactggctacgtgagtcaccctcgcctgtatctatatgaatcgagactaaccatttgaattcagtgtggctttggagacagttgtaaatatctccattctcgcgaggcatacaaggcaggatgggaactggatcgagactgggaagtcaacaccaagggcaagcaattaaccgggcgagtgatttcccagcgaaaaggtgcgggcaaaatcgacgcagaagatgatgaagatgatgaggatgaattgctagagagcatcccattcgcctgtctcatctgcgtgaagccttatcaagaacctatcatcaccaaatgtgggcactacttctgtgaagcctgtgccctacagcggtaccggaagactccctcgtgtgctgcgtgcggcgaggggactggaggtgtctttaacgttgcaaaaaagttgaatactctgctgaacaaaaagcgagaacgtgcgcgcaggattcgagaagaggcgattgcaaagggggaggaggtcagcgatgaagagggtgatgatagtgattagtctctgtatagcataatattaacacaaaagcagctggactgccaccttctcattgcatattctattacaacgcaactggaaaaccagttgatcgtaataatgcgtcgtaacatctctccgtccatgcatatcatttctggggctaatgtggcaaaagtggaggtcaaggtatatagtgtatgttgtaccatgtacagtactgtgtgccaaggcttcaccattcatcatagagacagtacgacaatacgctggtcaacgtaatcaaggaataatgccgaccacgcggcatgcgacgcaaccctaacgcggacatattccgtagttccacggcaataaaaccgcgggccttttgaatggctcacgttccccgctaagttgagacttgccagtgccaagtgcagtctagttatggtgcgatacaatactccgtacatacaatcacttgcattccatcagatgcccctcgggatattccttcccattttacatgatctcactacattgcggagtatccatctctgatctcagaggtcttacaagccatattgcaatccacttgatcaagatgtgggccgtcacagccacagaaataagaacccgcatattagggccctgaatctttcagggtccattaatatatgacggtattattcaagattaatattattcgactatattcgactaattcgactatgcttccatgttccccaagtaggctgtgcatcgacaaaaaggatcaatggagccgaccactaaaggttattctggccaatttaaaatcgactgcaaccgagccccactgtcttagtctgtaagtaataatagtctgggcgccttagttccttagtatacggtctatgcccaaactggaaaaagcctgctaaatcgtcgacgccacgtgctcttccggacagaaaaacgcgttatcagggtggatgcagagggtgcaataataccgagaatggaaatgtgtacggagattcgtaagatcaactgttaagcctttcgttccgtccatggctcaagcgtaaactcgtcaaaaaggggttaagcgtaggtccaagccaagctttttggtttctccccaaacgaccaaaaaccgaaaccaaaaacccaaacgccccttggcatcagactaaaggcggctcaggggagtcaaacgccccccggtggccaatgatatggccatgacatctaaacggggtaagtccaaggagaagctcccctcttcggttctatttgactttaaatcttttcctttttgtacggggtaatctttcgtttccatttcatctgccttgactagtccccttctctttcctttattattccgcgccttcattttggatcatttttgccttcaggggtggtatttcggaataatcactccttctactccttctactccttctactcctatttcgcatcattatcatacatcgggtacatatcaatggcttagtagtgaatcctctacctcaagtcacacttactacctctccacagagggacttttaatatcttcattcattatgaaaggcggattccgtatcgcggggttttgcgttacctgcctcattctattctcaatatatctactcgaagcgcatctacaagacatctgcaatcaatatcgcgctggcgcatatgtgattcgttggctagatcgccatggcactgccccaagcccacatggcgagatcacaccgggtgataaagtgattgtgatggccaagctggaagaagagaacaccgattgggtgaaagacgagcttcctgagtgagtgcttcgatttcgcacttcgaagacccaactaattggcttgctttccaaacagctggcaacgggcaatctacactgtcaacccctcacacgagacacggctaaatcctgatgttctgacaactccattcaacaaaggccatgaagccatggcctacttcacgtacataatcgactcctaccacaatctcccctcgaccatcgcctttctccacgctcatcgcgcaggcttcctcatggcatggcacgtcgatgcgccactccacgataacgtcatagccatgcgcagtctccggtccgatttcgtccagcaaaacggctatgtcaaccttcgctgcaattggaatcccggctgcagggacgcccatcgcttcaatagtcatgtcaccgaccaggtctggttggatgtcttcgacggcacgagtacgccgcccttgaatacttcctcgtccacgcagcaggagttcgccggccagatgtatcttcgcaagccggccaagatcggtgccgcatgctgcgcgcaattcgctgtctcgcgaaatcaggttcagaggcgtccgattgaggattatatcaagttccggcaatggattatcgacacggagcttactgacgcttcgtcggggcgggttatggagttcttgtggcatataattttcggcatgcaaggggtatagtaagttatggctggtcacattttgttataatgttgaactaacgtcttttgcagttgtcccgatgaagaattatgttattgtcaagtctacggacagtgttgattccggtcttggcttgagcattgacacctcccggaatgggatctacatatcgtggaccacgtggcgttgcacgtggcattaccttctccctaccacatcccttttacgacagtacaaacacccgctcacttgaattcggccatacatcttgtcgcatagaacttggagttttcagaagtgcttttcttatatattaattgcgttcaagcgtggaggataaggttccttatgcacatactctatcacttttaatgatggacttgaaaatcagagtacataaaatatatattcttaccattgtcttcttcatttccttgcatacatctcatccatccagactttatggcctttactaccaaagtgacttcatgctctaatatctctgcaaataacaagacactaattaccagagacagtccgaatacactgctttagatatccacccaccctctgcacgtcatcaagacaagcaacaacaccaacataaccatcaggtctaaccaccaccaatgcaccgtgtgccggatccacaccatagatactatacgcattatccaaagccgacccatcatagaaacgcatctcagcctgctgctttacacacgccggcacatccttccactcaaaagaccgatgcagccggggatgcaaaataatcagctcaacagtcgatttcggaaactgcgcttcaagcagagcgacttcttccaatgtctgtacagaaacacttctccgatcaagaaggtccgttgatgtaagacatagaatgcggaatcggccagtagaggggatatctgcggtgttatctgttagatatcatataatatcaaattccgaccacaaactccgagtcccagcgcattggcataccatcatggatatcccgctgccacccatcagcatgccgcagcaatcggacattaagcaatctccggcccggtctcaggatgccggatatgtattccgttccttggatggggtttgaacgcctgccctcaacaccattgtctagctcgtctcggataactagcatattctccgggtattccacgccacacccactcgtaaagccatttccgagcttgaaagcctgttggaattcttcttgtgtcagtccttcggttgcgcccatttgccctgagaacatggtggagaacttccggtcgaagtcgatgagctgttgggctatttcgtgccgttctgtctggtatgtctcgagtaacggggttgggctgggaccgcttggttctggtgcaagcccgttaatgtggtatataagcttccaggctaggttgtaggagtccatcattgagacgttcatgccttggccagcctggtggatggaagttagtgattttgatgtgctcgaggaagagttgctgggagacttactttcggactatgtgtatggcaggctatacatgtgcttctgttagttcgatgctatgcactctcttcggggcaaacttaccgtctccaacaatgaaaacccgtgcaacccccttcgaatcattgacgataaactcgggcgagacacgctggccaatttgatacgcagcccaccagtcgacagcatcctccttagcacagagagagtacggcttgatcgcatcagcagcttgtttcagaatcccctcgagggtaatcttacttctccgctgtcgagcatccccagacttaccatcctctcctccatccagcatctgatccccctcttccacaacccccggaacctgaacatacaacctcgtgagatattcaccggtcgaaattctctctctaggaataaccataacagaaccagctggagaatgaatcgcacaccgacggcgaatatccgggaaatccgtctcaacaaccacatcaaccacaccccagatatgatccaacgactccccctccagcgacagccccatacaccgccgcacaaccgaatgcgccccatccgcaccaacaacatgcttcgcgcgcaccgtcttcccaacccgaacaccatttacgatcgtcaccatactaacccgcacagggaactccgcgtccccatcctcatcaatcccaacatccacaacctccgtattccttaaaatcccacgctcagaatacctcatcaaatccgtttccatgatacgctcgacacgtccctggtggatggtagcctcgtagcggaaccgcgctggcgggataatctccggcacgacggatgtgcgctcgatcactttctctggatcggatgacgggttccagaatgcgaattgccacatttggcacgcttcgttctcgatttcggtggagagaccgagggttttgaggacttctagtgtgcgtggctgtaggccgtctgcttggccggttttttgagtgcttggttttgtgtctatgctgaggagggaggtggaggttaggccgtagcgggagaggaggagtgttagcattaggcctgctggtccggcctgtgtttctatattagggatttgtttttgtttggatgctggatgttggatgctgtgttggtatctggggtattgtattggagagcacatacgccaaccacgactacttcatatttctcttcgtctttatcatcgcgcttgaatgggggtgctagtcggggtagtggtggtgcaaatgatggtaggactctcaagtcccgagatgaggaggaatgctcagtaaagaccggcattgctttttgggtgctagaagcagatcgttcgagaatctttagttattggaagggagaaaatggatagttatactcataaatcgggtttgatttagttggcctgttttgcctgttcttatggggtagccccgcgattctcttcgagtgggggatctttatatccgcgatttgcgcaacaactactccatacgcttgttttgattggatcaagctggcagatagtttattttgagaattcgtcggtaggagagggtggcagtttggatatatgtacagcagtagccatttggttacataggtataccattcggaatatctcatacgtccgcgaataagagcatataaacggcctttctttcgtgggaccatgtatgtgtctagtgagatgctcttttttggagaatgtcttgttgcatgtatggcatctttggtcatttaacgaagacctggatataacgaatatttactcgtgtctcaattgattcattttaaataagttttactgtagtatgtactccgtaggtgttgatcatcaagtccggaattcccccatttccccacagtacgtaccccacatccatttcgtgcatcaaatctatggttcttggtgaaaggctatgctttcattagttaattactagaagtattttgcagcaccttggataaaaatattgatctttcgaaatagctctggccataagtaaacaggaagtaagatcataactcattaatcgcgcccaaatcgcagcaaccctggatcccaccaagatgatcctaagcaaattggatcagtgtttaaagcttttgctcaaaatactgctcaactcgctctacaagatctgctttcttccctgctgtggcacgcccatgcgaatgcaagaactccttcagcacgaccatcgtaagctgaacgaggtattagtttggtcaattacccgagaggattcgaatgctcaccttggaaacagtgcctttgtcaaagcacttttttacttcatcttccactccaggggcgctgtcttcaatcttaactcgctttggtgggtggtcgctagcaggctcggtcttcgcacctcgctttaccagcgtggaggtggctgctgagccgtcaaacatctcggaggcctgcaagttaagttcctccgcccatttaagaatatagtcgccagcgcgctgtggtgaagcatacattcggtcagtgcatttccgcaatttctaagagcatggaagcagcaaccttatgaacctgtcggtacttgggcacagtcttatcatctggtgattctgggaaatcttcgtccaaggcgatagcctgtaagatacgatagtgccattgaagcgctgcaacttggtcagatcatttccaacaaatcacagtaatgaggctcacaagggttcggatattttgaagggtcgtatatagccttgggaagctgcaattggcgaataacatcccgcatggcattattcaatgcgtcccctgctcggttaatcttactatctggattttggcgcacatcatctgcgaaaggaagcgcgataatccacatcccaggtggaattttctgcacgccattctcgtcgatcttttcagctccagcaatcatagcagctaagaccggtgaggcatttctgcgggggataaaccaaaccaaagccagtttctcggaatcgagaagtttctggtgcaatgcagaaaagacccgtgtggagccaatgtaaccctcttcggagggatagataaatgaggggtgtttgacattggcccagaacggcagggctgacaagggcttgaacccaataatacggatcacagggtcaccgaagttccttagcgcctgttgttcttcaatgctgaatgaaacctgctcaccgccgaacttgtatgcctttcgaatgctagacttatcgatctcctgtccggtctcgtcggacattagagttgtgacaccttgagcaatctgagcagtctcgcccccttgccatatgaagcaactcctggcaggctcttgctttttgagcagcaaatatccattgacggatatcttgaaatcaggtccgatctcaagtggcacatttgagaacagcgatcggcggggtacggatctcgagttgatgctagacaatagagaattaagcaatgtgagtccgtcacctttaccagtcgatgcgttggtgtccggctgtaggtatgccggggcatcaccatcactgggcgatgttttgtagatgatgtcctgctgattgtgagtataccgctatacaattaggctaataacctacatcgtagaatttagaggtgtcgaattcgtgatctgattgagagatgggaaacaactcgatattgacaccaagatcgtacaagtcccttgcgcgaactgttgcggcggaccgcattgccttattgtctgcgtggggattatcgttgtcagtcacgacaaacagtcgtcgagatgagaagtttggagccttcgaggtaaagatctggtttgcgcagaacagcatattggccattgaaactggctccttcgatggttccaagatctgccgtacgtcatcgtcaccatctgctggagatgtgagggaccgtaagtgcttgacttcctgggctgatggaacatcaagatccgtgtacagataacagtggggatatgacagatcttcttggtcgtcctcattttcatcatagaacttggataatttcgttccgtagagcagaacgccaatcatatcatgagggttggagacgatgcgctgttgcatcagatggtatgcacacttcaaggctgcagacgcgggtgattcgtcgccatgtttcttaggatcaggtgatggacgaggcgtgagcatcgagctgctgatgtctatggcaaacaacaccgcatctttgactgatttgaagctctatgtaggcaacagtcaacatcggtaactatatctccggcttttgatactcacggtctggtcgagctcttcgtcctcgtaattatcctcctcgcgcgtgtagtaatcttcagccatggttgttacaaatatgagcttgacagattggaaagatcaaaaggtgtaaattaatcaaatctaaaatatcatcgagacgcgctctctgacgcggacaacacgaaagtcaggtgacgctgatgcctgaagctgctgacattctccgacggtgattggccacggccggtgggcggcgaaagctacataaccaaaaccggattcaacaaatccgaggtccaacataagctggaattgtcaattcctcctcaattaataccttcagactactttcttttgtctattccaaaatataattcatccccccaaaaccatggcattccgcagccttttcgcgatcccccgacagttattgactgagaccacatctctcggaggtcggtcggcatttagcagtcagctcagatgcaatcaacgaggtctcgcaacggtggtaccgccagtcacacaaaatgcgacaggttccaagggcccgacagctattgtttttatgaacatgggtggaccttctacaacggacgaggtggaggactttttgagcagactatttgtacgagtcataaatggctacattggccacgttgaattgatatgctaacacatgaactacaggctgacggtgatttgattcccctgggacgactccaatcgtatatcggccccctcatcgcacgtcggagaacctcgaagattcaaaagcagtacgcaagtatcggcggcggatcgcccattcggaaatggtccgagtatcaatgcgcagaaatgtgcaagttattggataagatctccccggagaccgcgccgcataaaccttatgtcgccttccgctacgctgccccattgaccgagaccatgtataagcagcttttcgccgatgggtttggcaatggcaagggaggacgtgctgtcgcgtttacacagtacccgcagtactcctgctcaacgaccggcagttcccttaacgagctgtggaagtggcgtaatcgtctcgagggaaagcgccctaatggagggtccgagccagctggcgcaatccagtggagtgtcattgaccgttggccttctcactctggtcttgtggaggcgttcgcacaaaatatcgaggctcaactcaagacatacccagaggagaagcgagaccaggtcgtgttgctgttctcggcccacagcttgcctatgagcgttgtcaaccgaggtaggctatgtccccgattactctctagaattacactaattattctctcacacaggtgatacctacccggccgaagttgcagcgacagttcatgccgttatgcaacgactcaagttcaagaacccataccgcctgtgctggcaatcacaggtcggacctagtgcgtggctcggggctcagacagctgataccgttcaagagtatgtgaaacgaggacagacggacttgatcctgattcccattgcgtttacaagcgaccacatcgagacactgtttgagctggatcaggaagtcatccatgatgccaacaacccgggtgtcaagcgcgcggagagcttgaatggaaacccggttttcatccaggcacttgccgatattgcccgcgaccacttgcaaaagggagaattgtgttctacccagatgacactgcgttgccagggctgcaccagcgagcggtgcttgggtcagaagaaattctttgccggccaggaacatgcttctatggtggtctaaccttggaagcaactaagcttacatgagtttttgtttggactagggaagtccaaccttgtatgtatacggactacgaggcgttggaggcgttgtaagagtataaaatttcggggataatgtactgtacgatatatattttcaattcttgcagggcatcttacgatatacaaaggccgtcagaatgacaccttaatatgactacatgtgcaagcccaattgcggagattccggagctaagagctgccaatgatgaaatcccgataagaattcaaggaatccaactaacattcccccctctttcgtatgagggtgatgatgtgtcgtgtctctaaatcttacaaatcaatttgttagcggtaatcttacaaagttggaatcctgcgaaatcccgaaatcaccgccaatgtcccaacttcatcatggagaacgaagaactctttgtgggggatcccgatattgcggagctgcacacagctcgagagactcgtccgattgaacatgtaaccgaaaacacgcctctaattgatgaagccgatgggctgcatcgacggtcttttgaccttacgaataatcggccgaaagggaggagagcgagtgtgagtgactgatttacgaccaaagcgtcggaaacaactgtctaatctgcaaacatgacagatttggtggctgctcccatttggtgtcctttttaccctgggttttggtggaatggctgtgcccaagatcaatttggtcatgtcgctcatctgccgagattatctcgccgagaagaccacccaagaccccggattcacctatctccctgttatatttggggataataatccacagtgccagataccgcaagttcagtcgttggttgctcagttccagctctatctcaatcttattgcgggtattctatcagccttagtgagtccccggttcgggcacttatccgatcgctacgggagaaccaaaatgatcgcgctgggcgcgatgggcgcggtactcaatgaggttatcactgtcattgtggctaaatggccagagcgggtctcggtcaatatgcttctagttggagcagtcatggatggactgggtggatcatttacaaccgcacaggctttgatccattcctatgcctctgactgcacgcccactgaaaaacgaagcgtggcattcggtctcttccacggtgctttgttctttggaattgcagctggaccaggcggtgccgcatttttgatcaagcatggaggcacgctacccgtcttctacattgcgcttgcattccatgcaactttctgtctatcggtcttcttcatcgtgcctgaatctttgtccaaggaacgacagctcgcggcccgcgagaagcatcgcttgaaaattgtggatactgactctcctaaatggtactcttggcgtgtctggaacccagtgaacttgttcactccgctttcaattctgatgcccgccgttggaaagccgagtgccttgttccccaaccgccgcggtgccagtccggctctacgccggaatatcattctgctggctgctatcgatactgctgtctttggagtcgccctgggcacggtacaggttatcatcatctacgccgaatacatgttcaactggggcagcgtggagtccagtctgtttgtagcgaccgttaatgtggtgcgagtgatcaatcttttcctggtgcttccgcttatatccatgttcttccgcaccccgtgcgtggaagacggaaacattcgcggctcggacatgctggacattgttctaatccgcacatctataatattcgatattttgggctacattggctatgctctgtccaagacaccatcaatcatggtgatttctggtgtcgtcgcctcgctaggtggcatgggttctgcaattctgcagtcatctctgaccaagcatgtgccgcatgaacgcattggacagatgctcggcgccactggtcttttgcatgctcttgctcgagttgttgcacctactgtatttaacttaatctatagtctgacggttgcaacattacctcaggtagtgtttgtggcccttgcggctgtttttggtgtagcattcctcatgagtctgctaatcaggtcgcatggtatgtttattctcccgatctcctacaagaagtatactaattactgtgacagttaccctggaggctggtccccctactgatctaagattggaagaagatgccgacgagcatgacgggcttttgcggtaatggatggttctttctttgatacaataagctgtgcttccttctaaatgttatatgtctgcttcgtagcgtcttttttgatgttctatatgattgattgaaatagaccggtctttcttattctactttgcaactctcatggatacatgactatgtaactagctgttggttatttcgtaatgaagatgctcgatgcatgctcggcagactagagccattggagaaacacacatatatcgatagacctggagtaggcatagaatatgcagcccaactttctttatcatatatccctttcctcctgatttttatatcttataggtcgacgtgaagtcatggaagttgtatgcggttagatccatgggtcgtatgacaggccggcctccggtctccggcaaccggcactggcctaacgcgcaagttgatttgcatcgggaaaaaagatgttactccgaccttaccctacgctctccgcttcaattgcctgtacacctaattttggaccatagctggtggttgaaactatttaaatctcctttgtttcagtcctctgctcgtttcggaacatcggtgcaaggccgctcatgtacgactggtgaacccgcgcgcaacccgcgctcaacatctgcaatatgcttgcccgcgccgcaaaaggcggctcgataataccttctcccaatgccctccgggtactccgccaattggctctggccggctcaacagttggcggattctgcaccgtcgcagccctcacgtacgaagcccatcgccgggtccgcatggccgagaaaatcatcgagaataaacgaacactacacagcagtgcgccgaattacgatgcaacatctgccgccaaacgactaaaggtgatggtcgaggcagcagaggcgggcgaattcatgggcattgaatccctcaaggcgaggaatcggaacgtacccgatgagccagggttcgagacagaagaccttgagcccaagcccaagcccaagcccctggtcagcttggaaaaacaccatgctcgctcaaaacgttcgctctttgggagccagtcaattgcacaatccaattacacaggaaacatcgattctccgggtttggcccagaacgctgaaattctggctcgggagaaacaacagggcgaacttgcacgagaatctggcaagctgccctttgacgccgaaatccgcaggttgttaactgaggagcgggaaatcactgctgcgaatttgttcttagcgcacactcggcagacacctaacatctcttgggaacgcagagagcttgcatgtgttatattcaccgccaactgcatcaaaggaaacctcttcgttgctcgaactttattcaatcgcctggacaaagtcagtgtcgtctcggcggagatgtgggctacactgatgcatctccttgcgaaagaggggcatattgactctgtcggcgttatatatgataaattcaaaactagctttgctgttccaaaccatctgttggaggtcatcctgcgatgtctgatcgagtccaaacggttggactcggccaagttcctcttcttccagcgcttcgaggatgaccgtgactgtggcctgtgtggtgcttatcttgatggattatggcggaagaccaggagcatggaattgctgtcttcccaactcggcctcattctcaaacgcctcgaatcactcgatcgaagaccaacggagaaacttttcaacccaatggtcaaggccatggttgaaactggccgagctgaagaagctgaagctatggtcaaggctatgccaacacactacgggactgagcctggatgccggaccattggcttgattatctacaacagagcacttaactgtgaatgggacagggtcatggatggcatgcatgctatgcacgagcatggatacacccaatcaaagaaggatttcactatgattttcgaccgtgtcttcttggaatactaccccacgcacacgggccagcaaattctcgacttcgtcatctcttgtatcaacgattttgacatacaaccggacaaggtactccaccgacacattctcgaagcgatcattgaaaagggcaacgaagatatgatcgcactcattatggaaatggccgaggaacagaattggaatactggtattgacgaacggtttatcaagtcactcctgaagagccgaaaactcgcaatgaccgacaaccctgtgggcatctggcgactgaagcaagccgccaagaatcgacaagattatttaacttcttccaggcgcatccttgggactagttctgacacttgggccgtacggggtgagaaaattgccccgattcacattcccgccgaggaaactttccctcaaacggtcagcgagatggtggcatccaaaaatgctagtctatatgttccgctccacaaacggatggagcactttatcaacatgggcagacacaccgatgccctggccatttaccatcacgcatccactggcggtttcgtagtcaggccacttcatctgaagctggctgtgatcgccgcgattctcagttgcaaaaagacaggcttggcgaacgcgcgacgtctaattacatctgaatgggattactggaagaatatgccttctctccggcatagtaagcgttttacttcgtggattcccatcttcttccaacgggtcatggaggtagacccagaagccattgggtatggaggcttgatcaagatggccatttttgaatattacgatgtttgtgccaacaccaagggtcttttggtgaagcacttttgcgctacgtcttccagccgttacctcattgggggtggaacgccagaccttgccgtcgatctcctcacaacaatctatcaatctcggtggcggatctctcatggcttcgaccaggtactattgaagatgttgctgcgtgggtttgccaaggtccataactttaagggggtctggtggtgcataatgacagtcctctcgcggaatgagcctctcaatcaagactttgtcgtggaagccacctctcagctgggccccctagaaagtgcgatcagatccgatggctcctacgatgctgcggggcaagttttggtactccggcagatcgtgggggcactggaggccaaacttgaaggtgattcgcattggtcaaccattaatgttcacccggagttgaaaaggttgaagcgttccaagccattcaaactcactgagcaacaacatctcctgcccaccacagacctaggggagctcatcatgaactttgacgaagagtgggagttggatctgttgcttaagcgcaagcagttcgacgctcctgatcatgcaaagtggtgggctgagtccaacgtcacaaactcgaataccgtgccttcagaagatcccgagtacccgtggaacaatccagcgcattggggtgcgcattacgtgccggagaagtactcgtccgactatcacctggagttttcacttggaggggaatacgatgagtatatggagtatgaagattatcaggggcaccgggcgtcccaatgaacatgtataatagtgtaaatagtatatgtacaatagccatcctcaatagattcataaatatatgcctgtataccgtcgtatatccaaatcagtccactcggagcgattactaccgtggtgtctccttctgcgtagaattggaaaggcggagagaggtcatccagtgaggctttcacatgtcacgccaccacccacccctttctcaaacatcagcccataaacacaggccaatcgactttcctttaaatcaattgcctaggccgataatggtcctgcctcagtcgactccgttctgacattatctactcttccaaacccaaaatggcatccgtgctcaaagacgacgcttccctctccacggccgctcaacgccgcatcgacaaccacgaagctgatgttgtaatcgttggcgctggagtcctgggctgtgcgcttgctgtcgcactgggaaaacaagggcgcagtgtgatcctgctggaaaaatcgttggaggagcccaaccgcattgtcggtgaactactccagccgggaggtgttcaggcgctcgagcaactagggctacgggactgtctggacgatattgatggcattgatgtgaaaggatactgggtttcatactttggcgagccggtgctcctcgaataccccaagtctagcccaacctcgcctacaccgttaggacgagctttccatcatggtcggttcgtgatgaaactacgggcagccgctttgtcttgtcccaatgtcacagtggttgaaaccaaggtgactggcctcatcatatcgccagataccgaggaagtccgtggagttgagtgtatgaccaaggatgtcaaagatagctacctcggccaactcacggtggccgccgacggctacaactcggatttccgcaagcaacaccaccaatacacacccacgcggcgatcaaagttctatggtttggagctcattgatgcgaaactccccgcgcctaacactggtcatgtcctcctcagcgataacccacccgtgctcatgtaccagatcggcactcacgagacccgaatccttatcgatatccccgataactttcctctggcctcgctgcagaacggtggtgtcaagggctacatgcgaaacaacatcctgcctcagctcccagagggtgcccagaagccgttcgccgacgcgctagagcagggccagttacggtcaatgccgaactccttcctgcctgccgcggtaaacaagacacccggcttgatgattctaggagatgcgctcaacatgcggcaccctctcacgggtggaggcatgacggtggcgctcaacgatgtctgtctcatccgcgaattgctcagcccagagcgcgcgcccgacctctccaatacaggccttgtcctcgaacagctcgcggaattccactggagacgaaagtcttcttcttcagtcatcaatatcctcgcgcaggctctctatgcgctcttcgctgcagacagtatgtattctgactctttggttaattccagtaactaattgtttctatagatcaatacctccgagctcttcagcgtggctgtttccgctacttccaggttggaccagtaggcggccccgttgggctgttggccggtctgatcaagaaacctctggtccttgtcagccacttcttctccgtcgccttcctctccatttgggttctcctctgtgatacccctccgctcaagctaatcctagccccctactacgccttcatgatattgtacacagcctctgtcgtgattttcccatacatctggaccgagatctggtactgatctggcttggattcatcaattggtgttctactttcctcaaaagcgacaatgggggtactatcgtaacctgtggaatatatcgtcgatattacccgccaagtctttgtttaatatcccatcttcaccctgtgtcttttcttccacgccttatgtcatttaatcttgtccagcattttcccactgcatctgatacattgcaggatttgtgttacagatttactgtactatatactatatgtcataccattatttcaatgatagatgatacgatgtcaatatatccggaacattccaataatcaacgctttctatgctacataaacatacaaagaaaagaaccccaaccgattcacaagattcacaccctccatagcccacctcccttacttccgatgcccatacaccaggaaacaccaaacccaaacctaaccctcacaacaacttcacacaaagcgaatatgccaaaaccccaaaacaaaacgaaaacgaaaacgcaaagaagttaggtgcaacaggcacaggggtctggtccacacgcccaaaccaaggcagcgcaccaacgccaggcagctggagacccgaccaattccaatcccaggaaagaaaagacatgacggcactggctgagcggatggcgcaattatgtacgaaggagatgctggaatacacctcgcagattaggctgtaggcgagaaaaaagcaatagtataaatacagcattaaggaaatgaatatcatccacatctttttgttttcttttactttttctttttcctttctcttttttaggtgggattgctgttgggttgggatgtgtcctttaggtatgtatgtgtgtatgcaagcggattcttggtgtttgtggtttatcgtggattgtagagcggatgggttgctctgcacggtgttgttcttgtgggtccaggtaggagagaacgaggatgagcacgacgaagggaagagagagagagaggatctgagaattgaatctaagaggctagactttccatttcctccctttgttctctaggtctttgttattcgcagcccggtctcccatttacagacactgttgactgacagcaagccagaaggacaagaaaaagagttagaaatcggaagagaagacaatgcaatccaggaagtatcaaatacatgacctgagcaggaaaaagaagactttttcgaaaattttggtttgtttctcattggcaacaagttaatatctttctcttttgtacaaaaccaggaccgaaaaagaaaaaaaaaattggcataagaaaatgaaaagcatcagacacaaaaccgggtctaaccattgaacacaaagaactccgaacaactggaaagaaatcgtctcaatgcatgggaggcgtttcctggaaaatgaaccggccaactttcccgatggcaacgaatgcatgcatatatgggccctagtccctcggtgacggggaaaggggtggaaaaaaaagagcaaaataatgtatttcgggggaacgtaagttcgtttgggggatactgcgcggaacggaaatttgaaagcaataaaatcatttttgagacgtgagtatctgctcattcctcgtggacgtgctggagatgattacggaggcgcaacgacgcaaacctagtcaaccgccttttcgcaaagaatcatctgctgcaataagctcattaccgccgttgatcccgtttcgaggctccattgatgacttggtgttcttgcggttcttcttcttggtcgtctgccatccataagcgatctcgttcgtgccgttagactgtccgcctgatcttcggggcgagtctgtgtgtcgatctttggtgcccggagtagaattgtgagagccatcgtgtcggccttggcctttgggcttgctcttgccgttaacaccgtttgccttgtcggaatggtcgccattagtccggcgcttcgagttcgtcgattgatgtcgattctcattcgacccggatgcagcaggtttctcgcccatctgtcccgagtgcttaggctggccgatttcctttcctgacccttgtgccgcaccattccttactcggtccggacttgtcttcgcgggttgctgtaccaggttttcggaatttgataggtggtagttctgcagcctactggcgagaagctcagactggccattcatgtcggactggttttccccgttcacaccattgaccttttgcgtttccgtagatggccgcgtgaagacagccgaatgctccaagtcaaaggatccggagtcctgataatcttgagacaaggaatcggagaaacttgcaggtgtgttcatgttgtgatcatctgacgaggtataatggctcaccgccgagtaagggtccatcaagtcagacccatacgccgagcgaggctcactgggacgcaccgatccatccacaatcagcggacctggtgcaactggacgtggggcggattgggtagcttgcgacgggggcttgggaactggaatgtgctccgagtgagcagtgtccgacgagaacgatcccggtcgataatctggctgaagaggaataaacgaatatccattcgagaccagacccatctgtgcggataatggcggcagcatggaaccttgctgcagggcttgaagctgttgtggggttatataataacccaccacatctggctgccggttatcatccacagaggttgagtgggatccattgctggccagactgtttgagcgcattacattctcatcaccactcccttctccgccttctgacgactcggtggccgacctttgttttgaccagttatccgtgggtggcggcatggtataaagtgggatatagccgggaagagagggtgagccctgaggccgtgcaggttgtgaatgcgcacgaagagactttggggatccgttcgcagttgacaatcgccgagaattacgacgagtatcaggaatagcactaacagcagacggtgagggagggttggtgatagtcgcttgcgagccagatgcaccaactgaagcataggtggggttataaatcgtttgatgtcgttgggttgggctgagagtagcatgactcgcggttcctgttcctgacctcgggcatgagttttcctctggaaactcttggggttggggaactgggaattggataaatggctgacggatgaagactggcggtggtctcccagtaatcaatgcctggctatgcaattgcatccgcaattcttgctcctgtgcctgcaaaagctggatttgttggtataactggtcatgcagaagatattgtgcttgctgttgtgcgtgcagggagatatcggttgcattgctagtattcgactgccggaagttcgacttgtttgcggtattcgactgtcgtcgcccgccagtgagcccgccgcgcgagaattgattattatatctgccgccgcggttccctccccgtccaccccgcgatggaagggagggtgtgagagttggccgcggttggggtggtggtcgttcccaggtccgctcttcttctgctgggaattcaaactgctgacaacatccttctagatcaccgtttgcgatatattcgaaggcccttcgcaattccaaatgcaatccccggaacgacgtgtcgtcggcggtgtttcctaggttccttgacgtgttgaacggctcctccacgcacagtcggttgttcaacatcaggtgccagcccttggcctctttgttgatcagggtgccgtcccgtactgagatgacgttcttctcatagtcaaattgatagccataataccggaaaaacccaaagagcaactcgccaaccgattgcttgttcttgcgaccaaattgacacaaggtcttcaggtcatcatcgaacgagcagaccaatccatcgtgagtcaccctcttcttgtgcggacgtgcttgcaaacttgggagaactgggggattccttgtctgcagaaagttaatgatcaaacagatccaggtataagaactaagggttccaccaagtgctgcatcattgagggttctttgctttgtccagtgcttgatcgtcattgccaaaggccgcactctctcatccacctcgacataggtccgaatcatccgagtgttttctagcgccaaggtattattgacattcatgtcacaggctaaacggagctccgggtcccaaatcttcacgatggggacctttgcatgcgacacacacaccacccgttccatcccatctgtttaggtcagtctattattcagtcaagttgtatcaacgcgatcccttacgtttggccaacacctcggccaacaggcacacatgttccaattccttgtagctggttgtgatgcaaatgtccactgcgcaagttgttagttatcgccttttatttctcttgtgcccaaaaaaagagaagaacctaccatccgagtcacttgaacagagcttattccccgacgagccaaaaatgttcgccttaatattatgattcggccattgctcattgaaaagcttctccaatttccgcacaagttgtcgtcgtcgatcatcactctcagcagacggtaacaatcgatcatacagatccatgatatcggtcgacaattttttctcctcgtccggactgagctgctccttcaatgcccctttctcctccggtaatatatctgctccgagactatacggtacccgtcgtcgaaagaatgccatggcggtctcatatttacatcctccaagcggtttccgggagaatgggggtaggtgtgtggcttcggagtgggtcgatcgaggggaggtgtttccgtgggcgggggacggcgaccgagaatggaaggagaggttgcgcgcatgttggtatggggtagaaggaagggaattcgactggtgcgaagtcaacggaggccgagcggcgggttcgggcacgtcagagtgttgcacattggattgcgatctccatgccatcgtggagggctgtgccgacgctagcgaggcgacgtcacggtgaagggaacactttgcattcccatcgatttttgcgaccatatagcaattcacaactcccacaccgttgtggtccttccgtacgggggctcggcaaaagagataagagtccactcccacacaccacacaatataatccgctcagtttccgctctggaaatgactggagaaatttcggcgatggataaattcgagcgaggtaggttatggcacgtgtgtaacaagtcaagggttcgttgatatggtgagacagccgggaagcagatcgtttgtggtgggagacaatcgccctcgaccaaagtcgcgaagagccgagtttttttttcctttcacgcgggaccgaagaaaatcgaagagatgtaaaaagacaatgcctcaaccaggagatgaaaataagacacgacaggcgaatagtcaaaaaaaaaaagggtcttcgagagcgagaagagagcgcaggtttcgaggattgggatcaaagaaaagcgacaaaaaaggaccaagatacaggatgcaacatacaatccgtgtgccctttcagtgaatttgtaggaaccagcctgggtttccgattgttgaggaaaggaagcgtagccagagaggggaatttgcggaagttgtgaagatgatcgaagccctggaggtcagcccctgtcggcggtaaagaagacactcccgaccgttccttaaagaactccaatctttccaacgtccacgattttatgtatagcagtcgagcaatcggaggaatgtattcagggccagtgtttgcaacttggaacagatgttggtgagtgggaaattagcttataacgtatgacggagtagcccacggagagcgactatcggggaatagttctctgccctcatttcttaaacaattaggggctgacttcggtcctttgtctctgatataatctctcgctaatatatttcttactagcactctttgttctttttcccccgagcccagaaacttgaagccctgaagcacagaaagccaatgcagagttgcccgcggtatcaccgagctatgcattcatgcaggtaccatgacgacagattattgataacccggtgtatttgttgagcctcttggactactagctattgactgaacatggcaattcctaagagaagccttatatgctccatatgtcgtactttctcctttttgcctcctgatcgtcgttcttcacttctccccgcgatcagcatggtccttgcacgtgctgctagtataagctaatccatgtcagtggcctgaggcataaatatgacatagatactccgtatgcttcagaagtaactatgttgtggaatctaagattctgtaacatacatcctcggtgactcaagagcactcaatcatacttcttctttgtttgggaaatgaatccaccatggacccataattcactccggaatctgacagtggctgcccgtattataagacttgagcggatgaaccttgcgagataatagccattggatattgttctggggctaaccgaagagttgatcgtcagatggtagcctttgtctacaggactgggtatcgccacattgggaatgtgaggcttgttttggcgtgtttctttgtaaaactatctacccctcttcaagactgactgaacatctagttatcaagattcaagacagctccagcttgcgacttataacgtgaccttcataaaatcaagcatccggcttgtatgactaggaccagattcggccgagagcagttgcatgtatgacgagtgggaagttactacgcttccgcagggtaacgcggaggcatgcttgcgcgtatcgtctagttgtaagttgtatctttccggagggtttaaagaaaagtgctgatgctgtagcgtctgctggatcaacctatacagacaacagggcagagttgaaggaaccgataactcgactgcactatcaaacgcaaatccctctcctactctatatcttttgagtacctcggtacctgcaatatcccgctataaagtcgattcaccccgattccacgtatagaaatggtcccatgtacatgcggggaagactcgggctgctgactggctcgtcaagccggctgagtacatacatgaacatcgcagcggccaatccaactcagaggggcgcggaccttgcggaagaatatacgaagtaaaaaatgatggccgtcggacgttgccccacctctcctgaattgaccgagttggtcaaagcacgttcaaagtgtattctggaagcggcaatgtactgactagtattgcattacatctaccccatgtgtacggagtaggtattgtttctactagtatatctttcaatggggacttttaacggacctgcttcaaccatatgtatacgaggctctctaaatgagcaggctacagcaggctacatcagcctacagcggactatacccattacatgcgtttgttctgcgcactttccatggagctgcagatcaaattccagatgcgactagagtgttcacttgcagcctccgatggcgtccataggcagagagttcttggcaagctgactgcatagtgcagagcctttgcagattccaaggttagcatcatcatacgttgactccagggaattccttgtttggaccgggttgtattgtgaagataatcttagaacaacttggaaagttgaatctttgaatattgtactgaaatggagtataaagacgtagggcatacaagggcaacacaatgtcaatgtccacgtttttaacggtttccaagattcgagcattaaccttcaataagatatagcatcaagtatactccgtacagacagtaatagttggataataagtaatcgtaactatcagacacgaggaagctcgacgcttagcccccgtgtccccgtccaatctccggtgaccggccccatcagtgacgaatagaagcccttcggttgccgggaattgccgcgtacttgggatcttcgatgtacaggaaaaagaagggaattgctcaggtgaatggaagtggaagcattgaatgacaaatacggggattgtcgatgttcagtcgaatgtgcagagacttgggtatatactccgtccagacggagtactccgtataccgttgtaaacataagatactaacaaaagaacttggataagtatctaacatgtgttgtcctactttcagaataaataaaaagaaaaataacaatctcctatttgcccccgtatactgtcgctatgtaactattttcctctttggcaaggcaatttatgaaaagaccccctccccccataaggtaatacacacccacccccccataggaccctctctctctctccttttctcttcttcatccttccaatttttggactttctctgcctcgttcactcgtggtagaaagaaatactcggaggcttatttgctgtaagtgccatgattctatttcgatttccaggctgggattttttcttctataccctatataccccattgaagatactttgaaagagcgcggaaaaaacaccctcgaacggttttaccgagcccggggtaaaaataaaaaaaatatctcaaatttcgagtgtttcttttttatgtgttgaaagaagatctggagaattgtttgaaaagtgtgtgttgtggatcgacgctcacatttttttactcgacagatcgcctctgaccggatcaatctcccccctcccctgaacagtcgcaccctccggtccttttgatctcgacaatgtcttcgtactacgaacctcagggctggcaagcacccgctgcgcgccaggtctcttgggagcagccggcgcctccctcccggtcaggtatgggatcaaacgccgaggacccccggcaaaaactgacattcgacaacaggatcgagttcggtctcgcagcgcgaggatcttccggccttttcctcccaatttgacggtacggacacacttctgcttgaatctctacaattgcttatccggaagccgaatcgcataatgggggataaagttgttgattttgaagcgaggcgattgtggagattacctgggcatactttttttggggggcacccttttggagacaagtgctgatactttttttttaactttatagaggtcgatcgtgcgatcgacaatctcgtcaagagcgggaagttgtggaatgctcctcggcgggattcgatgcccatgatgatgggccggccctaccccgactacggtatgttgcgggcacggatggcacccagaacgcgtttctgacttgtctcttgacagaccctcgtatgggtggtggccctcagcgacaccattcgatcagcgagttcgatggcaaccgtatgcccccggcgggcaatgcccagggtttctatgcctcccagcggtaccagggtcgtcccaacgaggtggaacagatgatgcaggcgaagcgtcggatggcagcacagcgtgagagggaactccgcaactatcaccaggagcaacagtacaaccgaagtacgtggtagcctctgtcttcttctttttgagcctcgttatattcccccgtcggctttttcttctctctcttttcacttccttgcatctatgtatccggcctgtgtaatatatttggtttggctgcttcgcttttcttttgaacacggggttttaatacttttcttcttcctttcaaggcctcctcgccgagatgtctgcatccaaatccgaccgatccaccagcccagctgccgtgagcgaggacagccgtcgcgaactcctcgcccgccagcaccgcgctctgtacggcaacgaaagcccagccttcttcccgcccggtgccttctccgatgataacccacgcccggatagccaagccggcggtggcaccccgtcgtccgccggtgtccgtggatcctccccgcgaggcatggacccattcggcctgacacaggccggcgctactggcaccgatgccaccacgggcctgcagtcgccctcgcgcgccaacagcacctcctcgcctagctccgctattaacgctagtttcggcggtgagcagcccgtaacctcggcttcgtcgcccggcgcagactctccctcccgccaggcctcttccaagcccgctggtcctattggcaccgtcggtcctatcggttcccgtcctgctcccggccagacatctgcaccccctgccaatcaagccttgaacaagcgctccatcacccctctcccctccccacttgggctcggcttcactcccgctgatcctactgctgggcccgctactgagcgcacctcctccgccggtccttccccggctgtggcctctgcagccggtgcccctggcaccaaggaccaggccggtggtgttggcctcggctggagcaacggcagtggcgtctggagctccaagagcggactgggcgtgcaagcttccgtttggggatagatatccacttttgatgacattactccaagtgggcgcttgttgcatattggactagggttgtgctggcttaccatgtacttggcaggggagaaaagggacagggtttaccgggttttggaagtggtgttggatctgtctggatgatatgatgtctgcttcgctttctcctgtgaggtctcgggttcagcatgtttttgttctgcttttttgtttgttttgctatgtcggtgcccgtgcgaatatggtcggaaatatggcgctttatctgtgatgctcgtgggctatgtatgggctgtctcatttttctcggtgtttttcatgtcggatgcacaggtctctttcttcatctttctttcttttttatattctggggtgatggtacgggaaacttgcacattgtgactttattttaatgcctgttttttttttttttttactatatatctctatatggagatgggaggcgaaccgaggctcaaaacggatatttattggatttggatattcgacttctacttgtcttttctttttttcttcccccttctctctagagtgggtgaggtttgattatacggttactggagtctgtctactttgtcctcaacgggttttggcctcgtttcgacgtgatcaggaagcgaatgttgtgtctttacatacctattgaattctcattcattgccggcgtcttgtcctgtacaggtgtgtaggttcggcactatatgtctctggcctcacggcacggtatatatgtaactagtcatgtcttctatttagggcttctcatctcgcaatctggtagtgatttgtcttgccatgctacactgatatatatctctattctagcttagtttaatcctactacctctaccaggggttcaatgttgtttctagagtacgctgacgagataactagatactcgaatagagggtaaattgtattttattcccgaataaagattggtagtttaattccaacaagatagatgtagcaattgtcgagataattaagcattagtcgaaagcacgtaaacaagatcgtctttttcttgacaggcatctaacgcagcacacaacatagaatctagaagatcttcggtcacatctatgatccccacaaagatgataaaaagaaaaagcaacgaggatatccaccgggattcacactcaaacagcgctggtattcaccgtgggagtgtgttttgaggtgtcgtcgggggtttgagtttgatcctgaaattcggcagcggtagggatgacatgcacgatcttcctcttggcagtgaagagaccgacaacaccacgctcctggttagctccaagccagggcttgcgggcttcactcaagaccttctgggccaggaaatagatcagctggccgatgataatcagcacaaaggcaatcgggtacatccagtggatatgataatggaagaccttgacgccaatgatcacaccccagaagttcatggtgagcatggagacgttgaagaaagccgccgacgagagacggaacaacagcggagcgagacagtagaacatactcagacacagcgtgtacccggtgagatatccaccgacctttccgttccagtgcgcattgtggaaggaggtccggtcgaagatgccggcctgcgcgccgttgataatcattccgaagaatgacatctgcccgagcacctcgtacactggccgagtgctgacgaagtactcttcgcccgtgttggtgaggccatagaaggacgcggctagcagcgcgaacatgtcgcctttcagctggttgccttgggatatgtctccgccgttcgtgccggtgatgtggtctgagccgatgaggacgcccattccgccgatacaaagcaagataccaattatttgagcgatgtggtagcgcacacccagaaacaggaatgagatgacgacgaccacgacgatggcccagaagttgatcagttgcgcgcttagcatggttgtgtattggtatgccagcacaatgaagtagttgccttccacgtcacagaaagcaaggatgatgtctgcagcggttagtcgttgtatattggatatgtgggaggggaaactggggcatacatttccagccgtcacggtataccagtcggagccagcccttgaagccgtaacggtacatcgtataaggagtaaagataacgttgagtagcacatagtttatgaaggtctggaacgcagggattgcccattgttcctcgccgagtagcgttgtgaaggtacccgtcgaggtattggcaatagcgagaatttgactaggagcatttgggttagggtttgagggttgagctgcagtgtttgaactggttcttaccctagaagcacggtaatatagaattctttagtcttaaagtagccaaaagctcctttcttctgatcgaccagatccgcaggttgcacagggcactcggaggcttccacctgggaactcgaactttgtgcacccgtttgagcatccttagccagtgaattggtagagctgccatgttcgacaccagatgcctggacggtgatttggtccttcgactcagacatgatggactgatgcgagctcaaaaagcggggttatttttgaatgcagtggcaaaccagttgcagattgaagcaacgtagcaagaaaagggagctttatgaaaatgaaacgagcgcaaaactccctaagtcgctcgcggattgatatcccggttgaggttgatttagatgaagaagcagaaatctcaaaagcaacccgcctaagaggaaaaaacgtctggaacctttcccgatcgggccatcgtcgataagaaacttccacgctgttaagcacagccaatcagcgggaggatagtggggacggtgagggtctgtgctgcggacagggccgtccatctggtcttgttatgtcagcagcttcaagcaaggtggctggtacttggcgggtactgggagagacaggctaagcatcagcctggccgaagtaccttccgtgtaacctacatagcttgtggagatccatgcgttgagttgaccttgcagagcatatttatagatttatagattgatggatgaatcttaaattatattactccgtacgggctttctattgtacacgagtcagaccctgttaactataaataccttatgacatcttgactgacgccattccgaaacccctgagagagaacattgaatggattccccagctctgccgatcacggaagaacaccagaatcacggagatcaagtagtctcgatttagcataagctgcattccaagtggtatcgcatatttctgccgcgtgtgcacaataccataggtacctggtgcccggtacctctatagtcggacgttgttagaaatatttaggtaccttaggtacctacgtcgatgatagagatgaaatagggataaacagggagcatagggaatcctggaagacccggaagttcccactctctcttcacatcctccaaagtagcttcttgcgaaactcccggggtctttaaggggaaaacaagttcccatattccaagtacctgccgaggccgtcaggtggaccaggactgtttccgatcgtcatcccctccgcagactctttcatcattgggatctccacctccattccctctttgcgtctgtttcaagccctttccaaacaacccgtacacaatcctccgataaccttcttttaatttcattccgttccccacccccaactgccctttggctctcctctcgcgccggtgcacttttatcaggcccggagtgacgagacgcctttccctgttcttgccggaccatggcgctggaattacagccgcccgacggtcgccgacgagtgaaggtttatgaactaagagataatgattggtttgaccgaggaaccggcttctgcacgggtcagatcttaggagtgagttgtcgcgtgttgtgcgcgtaccggggacgtgcgatgtttcatcgcgcgcaatcccgagcgcatcaccaccatcgtcagtagctgattgctttggactaggaggaacctcgcatatttgtcgaatctgaagacgtgcctaatcgcgtcctgctcgagacgcggatcaccaagaacgagggctatcaaaaacaacagggtacctatcccgccattatcggctcatcgctgttggagatcttttttgactaactgtcacgcgatccagagactttgattgtttggaccgagcagaatggcacggatatggcgctgagcttccaagaggcggaaggctgtgcggtcatctggtgaggaatcaacaaaaatctttgcgcgcatcagctaaccacgtcgaagggattttgtcaatgccgtccaacaacatctcttgactctcacttcagctggtaaggtttgtcgcgtgtttggaagctggcatctctaattgttttctaagatgacgctttgtccgacgacctcgataactaccagtccatcgtattaccgacccccgaacttggaaacctccccgaaatcgaacagattgtacgagctgcgagcatgacacagggcggtcgggatgcgctatccaaatacatcattcgcgacgagtacatcgccaaattagtaccgctagtgacaatggctgaggatctggagagcttgatcgatttgcatcggttgtgcaacatcatgaaatctctcatcttgctcaatgacaacaccatcatcgaaaccgtcgtcgccgatcatgtcatcctcggagtggtcggggctctggaatgtacgctttacccggcttcaccctggcgaatacaattgatactgacgaaaacagatgaccctgaattccctacacataaagcgaaccatcgacaatacctcgcagacaaatcgcgatacaaggaagtcgtaccgatcaaggacccgatcattcgccgcaagattcggagtacatggaggctgcaatatctaaaagatgtggtattggctcggattttggacgacccgacgttttcagtgctcaattctctcatattcttcaatcaaatggagattgtgaatcatattcaaggaaacgggccctttctgcgagacctctttcaagttttcgacccgagaaatccggaccagaggcgcaaggacgacgccgtgcagtttcttcaccaatgtgcttccatcgcgaaaaacttgcaggcgccgtcgcgggcccaattattcgccaattttatcaaccatggcttgttcgccgtgatagcgttcgccatcaagcacttgaatccagctatgcgcacgactggtattgatatcttagtgattttgttggagcacgacccagtcatgatgaggggctatatgctcaaggccgtcaacgagaaaaagacgccactaacagacaccttgatcgaccttcttcatgtggaggccgaccttggcgtcaagaaccaacttgctgatgctatcaaggttctccttgatcctcagattcccatgcaggacccgcttggtcgggctggacccgattacttcaaacttcgcactaacagccttttatctgatgcatttgtccagcaacattttgacgagtcctcaaagcggcttttccaaccgcttaaacagcttgcaaatcgcacagcccgtacgtggtgaggtcttctgttttggtccagaatttgctaatctcgagtctagttaatgatttgacattccaagaggtcaccctctattcgcatcttgttgaaatcctcaccttttttgtccgccaacacctcttccgcacacgtaactctatacagagtgaatctcttgccccccgcgttgcacagcttctgcgggcaccccagaaacacctcaaactcggttagtatacatcttttccccagaagccatagctaatacagacgacagtcgccctcaaattcttccgcaccctgatcagcctccaagataccttctaccaagctctcatgacacacaataacacatttgagttgattctcgacatcgtctacgagacaatgcctcgcgacaacttgctcaactcggcctgtcttgaactttttgagttcatcagacgggaaaacatcaagccttttatcctccatgtggtggaaaaatatcgcgagaagctcgagaacattatttatgttgataccttccagagcctaattcttcgatatgaccagatgcagggttacggagccgaagccgatgcgacactgttcagtcaggatgaaagtaacgctccgcggagaattcctctcaatggccagcgctggcagggtgcaagagagatggatcccgcggaagaggattatttcaacacgtccgatgatgaagatgaggtaggtagtagcacttggattgagacaatttgagaatacgactgacaagacaagatgaagtgggcacagaaccgtgtggctactgcggatgaacctccaagcggatccgcctctgcggttgtcaaacctttggttgactacccagatgacgacgaggaggacatcatggacaccaaacctgaaggggcagggcaacagccagtggtcggtccaaccgagacttccaccgaggttcctgcatcaccacccacacagaaccctccggagcgacttgcagagaaacgtcgccgtgaggaagaagatgatgatgagcttagcaagcttaccgcgggacctaaacgaagaagttcaacgagcagcaattctggcgcctttaacatgaatcggaaaaagagtttatctgccggatcactgacagataagaatgcctcaccgggtgtattaaataatgtcaccagcgcggcgcctaagagaatcgccatcaacattggatcaacggccaaaccgcccatttcagaaactgacacaacccgcacagaggtgacgagcgagatttacgagaaggagaatcgtgacgatagtcagggtaacgagggtggatgaatacctcataagccaggcgttttgaattaagtatcctttttcatgacctaaataccacatttggttgcgggatttcccatgtttcatctcttgctgttctttgggcgatgcccatgccccttcttcttgctccttttctttcttcggggtatccctcatctgttttccagtggtcttgtcttctctggcctgaactagcgtctagttgaatgttgtacatggcatggcgtctgggcaatgcattggatctagccttgcggtgtctattctttttattttcctggtcgggcttagatatcgaccggtggaggaccatgcatccgcggatggagtcgttgcagtatcctgccattttcatggtgttcgttacctggaattatcttctagtgccgtagatacggcctgcacacctaccactatcaaaatacccatagagcccgggattatctctctccgtggttctttttctttttccttttctgctttctttataaacgtatcatatattttcgggtggtcgaggggctagcattggtggttctactccatagatgtagagtgcctggatccaccagccaaatccgacttcacctccccatcaatcctgcgcgattcattcaacgaccccggagtaatcatatacacaaagaatacatagaaaagggtacaattcgtgtaattatactccttcaattgtcttatattatctatctggacaatcactaaccgaggccagaccacccaacgaccccgtagccatctatataccctggataagagcgcgctacagcagattccatgagacaagccgaacaaaaatggcatccgaaattacctcaaatacctttctcaccaccacaggttctccatcagacccaaagacgacaatcttcttcatctccggcaacccgggtctgatcggctactaccacccattcctctctctactttcgaagtatctaggcgaggaagaggaaaattcaccaagcttacaatcattccaaatctacggctcatctctcagcggctttgagattgacgaacaccagccctcgccgccaccgaacaatggcgttgatctcgatctagaaggtcagatacgctttgtccagggaaagctcgctgccctaatgggagaccaaagaagcggcaatggtaacggtaaagctaccgtggatgctggagctagacagaaagtcatcctgatcggacactccgttggcgcatatatcgccatggaaatcctaagacgacaccgcgaagcgagcccagaaagcaccttcgatatcatcggcggagcaatgctcttcccgactgtcaaggatatcgctgcgtcgccttcaggacagaaattgacggtacataatacgcctcttgccagatgcttgtgcttttcttttccttcgcttgttgctaatcccggctcggttacgtagactctactttcaatcattccccgtcttgcggtggtggtcagtctcttcgtccgactacttacattcctgctcccgacatcgcttcttcgatatgtggtccggctcgtcatgaacgatccccctgctcatgctttggacgctacgtgtgcttttctgaagagtcgcggtggggtacgacaagctttgtatgtgtgatattctttcttgctatgtttaggctttatctaattactcttcgtcggctgctagacatatggctgctgatgaaatgcggactatcacttcggataaatggagcgatgatgtctggggcgctgcatcggcgcgtgagcctatcgcaaagctgtttttctattttggtcgtaatgatcactgggtggctgatcagacgagggatgacattgttgcggtgcgtgggcggaagggaggacaggctgggccgactatggttgtttgtgaagagggtttgccacatgctttctgtttgagtaagtggatttcaatcgactttgactacgatatgtagctttgctgacagtttatagaacacagtgatgtgatggcacgaaaagtggcgaggatgattgggcagattgtggcttgagggagaggctatggcttttacaatctatgcatagaatagacaggaactacataaagacaatgaatttcgcctttggcgcagattgtaacgggtatctcaagagacgctacgccacgcccattcccatcagaatgaaaaagagcccaaagctattcaaatatacaataaatcataaagctagacgccatgtacaaatgattgacggccgaaggaatgttcagcactctattgcccctgcccctgcccattgctgttgccttgttgagctagccctgctctccggaataaatctcctagcacatcggactgcggctgcggtgggggagtagggtggtgaggcaccatgtgttgatagctggattgctgtgggtattgctgcgggtgctgattggggcctagatggtgtgcgcgcacactccaagaatcgtcctgggcgcgctgctgaccaaacatgtcctgcagcgagatatgacgtcccataggcatcccagtttgtagttcctccatcggaggtgcctgtgtggaagccgccattgctgcggcgtgcaagctagtctggcgcatagcctcgagacgttcgcgagctagcttcatgctctcccccgcgtgggtggcgcactcgagaatcatctgggcgtttatggtgcgactctccgcggtggagtttggcggcggctctgagtagatccagagaccgtagatgcgcacgttgtttgtgccggtttggttcttggacaaattctgggggtgcaaggggtcggcgatgccattttgtccagcttcgccttcggcgctttcttcggctttgagaatcacatattcctctgtaatttcgacattctccccctcggtgagagggagatcgaagttgtccaacccgcggcggtttaccacgaaggcagtatagcgatcttcgcccagctcaccctgtgtttcctgacacacaaacaaggttccttcaactccgttcttttcccattgttttgtggtggggctaaagatgtagacaactgcgtagggggcgagtgagaggatggaggtcactgagggcttgtggcgacggataacagagaggttgagctcttcgttcgagcggagcgggggtgcaggttgttgctgcatatcggagtagtatggggcgtcagattcattatcggtgaggttgacaggattgtgattgttctgtctccgcggtttgcgtgcagtcatattttctgttggaacccttggaattgtgcacgatggaaggagctggggcatatcgtcatggcagctccgccttcgcgcttatccggcgtctctctactttctactttctctctactctctacttgcgcctcttctcttttgaacctcatgtaaggtaattgggtactggcatatatttgattcctttctgattggtctcggcatatctccttccctaaatttcgcgtgatgaggatccgatccttctaaaccttggtgggatgacacctgatgaaatgagccattgtcgcattatacaaccaattcgctcaattcgctcaattccttctatttatcctatggtactcattaccgcttcgttcttctactgcaacaacactcataccctattttcccttgccggaattaaggaccgcgcaagcgcacacattcatacatacatcacgctacatactgctaccccactgaacctccaaccatagccaagcgaggcaaagaagctttatattgtgatttcacagacaatcacacaccatgagtcctaaatcgcaaccgtcatccgcatcagagcacaagagccacgaggccgaatacacggaagaaattaagaagtcaggactcgacgttctgtcactttcacgcgcgattagagcaaggaaagccgagtacacacgccggagatcgatccgagtcaaggtcggcacgtggaatgtagccggcatctccgacaccgagaaggacgttggaaggtggtttgttcagggagaaggggtgtgcccgaagttctctgggacaaactacgcgcacgagccagaatccgattcgcccagcaagcccgacgagccaaaatcagacagcgataaaaaagtaacctttcactacagtcccgaggaggtagacctgtacgtcttgggcttgcaggaagtggtcgatatctcttctccaacagaagcgttccggccatatgttgacctcacaccgtccaagcggtggaaggaagctgtggaaaaagcgctacccgggggatataagctagtatctgaagtccagctggtcggcttgttgcttctgatatatgtgtcgcccgccattggagacagtgttgcttctgtcagtagtacatctgtcggtacgggactgatggggtacatgggaaacaaaggcgctgtggcaacgcgcattgtcctgggcgaaaccacccgtttggtctttatcaactgtcatctcgcagctgggtctgacaaaggcagcttggagagacgcaactgggactcttctcagattgtccagcgtgctagatttgacgcggtttggcccgaggatgacggatcgggcgaatcgggcgaagcaataggagatgaagatttcactttctggtttggtgaccttaactaccgcctcgatgatatcactggcgacgatgtgcgccaagtcctctctcgacataccgccaatcagtacgacaaagagcgccaagaaaagatgtcttcaagcccttctggctctacggccgattctgatgatgattcgccttcctcttcttcttcttcttcttctccggacgaggagacggagtcagtcactgcaactgtcaccgaacctgtcaccgacgaacagattgaccctcataatgaccccgcgtctcttcaaactacaattgcctcacttatcccgcacgatcaacttaaacttcagcaaagaaaaggatcggctttccacaagggttggcgggaaggtcatatcactttcttgccgacgtataaatacgacgttgggagtgtggccatgtttgatacgagcgagaagcagcgcgctcccagctggtgtgatcggattctgtttcgtagccagcgggataagctgagacatgagaagctcgatcaggaagcggaggaggcccgaaagagggacgaggagatgaaggcaaggggactggacaaggctgttgccgatgataacgtcttgtttgattatgaccctgatgaagacggtgcgaacagcgaggagtacatatcggacgaggatcaagccgctgatgatgatgatgatgcaagcacaattgcatcgctcgactcttgctatgatttaatccgcttggaccattacgtgtcacaccaaggcattctgtcgtctgaccacaagcctctggatgctacctttaccttgagttttgatgcagtcaatcgcgatctgaaatcaaaggtgcatcaagaagtggcccgtgaattagacaaggccgagaatgaagctcggcccgatcttactattgtggtggatagacatagtgaccataagcgcccagagaaagatcctgacaccgtcgatttcggggatattgccttcgatgtgccagctcatcggtccctaactattgccaacaccagcggcaccccggcaactttttcatttgcggagcggcataaagttgtcgacgagacaattacacaaacagcctcgtggcttgttgtgcgtgtctgcaagtctgcagacatcgccacagacaccggcccatcgatggcttcttcgtctgagagccacactctgcttcctggtgaagtagcgaatatcgatgtcacggcttacgttcgcaacatcgaacacgtccgattgcttaatattggaaaggtgaatctagaagacatccttgtcctccatgtcgatggcggccgtgaccactttatccctgttcagggccgttggctacccacctgcttcggttgcagtgttgacgagttgacccgcatgccagaagcgggtgctcgaagcttggccgaatcaaaaaccccacacccatccatcacagatacttccacggaaatccgcctgtcggcaccccgcgagcttttccgactgaccgaggcgatatccgagctgacagagcgcgctgttgcagagtggagcatgacaaacggtgaatccgaggagcataaagctccatgggcaacggatctttccgggggagcctggcctttccagcctgatacatggactctaaaggacccacaggagcgtgctaagctgcgaaattccgtgcgtgaagctcttgacaccaacaaatccctcagctcaatatttgcccctgagatatcctctcttcatcggttggaggtcctatctgaaactctcctcactttcctcaactcgctccaagacggcatcgtcacggcgaaagtatggcaagacatggagcagcagatagctgcgcgggagaaaagcaaatcccctcctcgaaactgggaagaaagccagtcctgggtgcttgagcacctggcctactcaccagcgcacagcgtatcattcacgtttgtcacttttatgctcgcccgcatagccaatgaagtggctccagtatcggccggtacgccgttgatcccattatccaagcaaaagaacaacgccacccccaataaaccgatagataagcaggccggggctgcaagccagaatcaagcccagtctcctactccagcttccgctactgccttcataaccagcggcagtttccgccgcaagaaccgcacctcgagcacatccaccagcaccagccctgaccccccacctcagaaccattcaatagcacgccgtcaagcagtcgagactgctctagcgtctgtctttgcacttgtgcttatttctgcctctgctccgatgccgtctaaagagaaagagcgtcgtatatctgaagagcggaggcgatcgatcattgagccattcttaaagatggttggggtagatgatcgaggtccatctgggggccggtattgattttttccgaaccccgtcatgttttgactcccatagacttggcttttgaagttgttagattccatcacgttgtctcgatgtgtataatgctgtattgaggccatgtcttcacgttttcctctagagatcaatgatacaggctgggcaagcaatttgaactaaagtcaattttcctatcctacagtccatgataaattatgctccggaagtgcttaagttaatacatgcacgccaatatactgatcgctcggtcatcaccccaatacccctcactaaatactatgcagtcaacaagaaaacaaaataaaagtccatgcatatccccatcaccccccatccccattcctcacctcagaccgccgctgcgacaccagcccaccaccctgccgatatacaccggatgacccagccctagccttccccttcgacgatttagacttcgatctctgctgcggcgcaggcttccgcccgatcagcatccgcttcgccccaagccaacactccgagaccgcacgcccaggcaaaccgaccagcgacagcgcaatccgagcagggacgacgacgcacgcgcaagcccagtccagcaagacgagcgcatagtttggacgacgagactcggccgaccgcgtcgcagcagccgccagcgcaagcgcgtcgccggcctgtgtctcgaggcgcacgaagcgctgatcagtctgcagggagaagagggcggatcgtttctcgtagcgacggacggcgcggttgagggcttcgatgtcgggctggatagcttttcgggtttcgagggctgcgttggcgaccagggctggggagatctggggttggtcttgttcttgtattttttgggaggggtctttggtgtttggttttgtggcgagacgggcggttgctgtctctgcgacgtgggcttcgagctcttcgaggcgtttgactaggtcttggagggttgttggggttatgattgggtctgttgcggatgatacgatgcgttggaggtggagggtgcgctttcggattagtcttaggaggtgggagactgggcggacttcggaggctaggaggaagatggttaggttgtagtttgatactaggccctcggagggtctggagagactggagcggatggcgtggaggagaccggtgccgactatagggaatatgaagcaggtggctagagcgatgagctcgtggatctggagctcggagatggctgttgctgcatccttgtgttgttcttggtcgtcgagctcgaatgggggatcgccgggcgctggaaatccactttcttcgtgtcggatggcctgggccgagcgataccagtccctttatatagttcatattagtactttgtttggggagattgtgggggagggggggccataccaaggtaaccggacagaccagttgaggaatatagcggccaagactagtattgtgacgtcggtgacgaacgaactaccttcatggaagaaaatgcctgctattgcgggcagcagggccaggcctagcggtgcagaatgccaatgcgattcttctgtcgagagtgtgccatggcctttttctacacggggtagaaacaagtcgtcggtcgatgagcggatagagttgcgggcctccgagagcgtgtccgagagggttgagttccgtcgttgattttcctcaaaggtacgggcgcgacgtatgttcaagggccgctgagtgggtgcatccgccatgttgtttctgaggttgggaaaaggaacatgtgtgtctcttacttacaccatacggcctggagagtatgggatacaatgccgaggatgatgcaatgaggcccgacactccagggctttgacttgaccatcgaagaacatttgaataactgcatataaatatgtaggtagacttcctaatagtcaacatgaatatctcgcattttatatatcttttcctatatgattctatattttggcggctaacacccataagagactataaacaagacacctgagaccaagactactcttgttactagctatgtagcttgggaactatgccatatctaaatagtagactattcagtaacgagatatagacgcattttaactatttctattgttgcagtgtcatttattgttagccgagggtcatcctctacggactagacgcatcaactctctcacacctttaaaatctggtcaatcttctaatttccccaacctgatagactagacagtctagatcaattatgaatcattcatctcccatgccgaagtcaaaaataacaggcggatcagaatgaataaactccctgccctttcgggtctattgacacccaaatccggactggggtgcctcacactattcgctcaaccacaacaccccagacgatgggcttcgaatttctttattcggctcctttcatcttctttattctccttattgcaatttgttcagtctaattcaaagctaattcaatggacaggtttctttgcttgttgcagaatatgtcaaggcctggtacccccggccgtgggttttgcttctgcagcccatacctttctctgaatagtacatgagtttgctcaatacacgatgtcttgagctatgaatcaacctcctgattctcactattcggatctcaataagaaatcgctgtcaatcacctcccctggctgagtatacttcatcgagagaggatggttccaatccattcttctttctttcatactatctcttagtctccttgatcattttgcaagagaactggagttccagactatctacatattctttttaatctctgttttacatctgccgtcatggatattcaccacagatacccgcaggccgtggctctaccaattctatctattttctccattgctctcgctattccgccattaattctgcatggaaagaaccgaaatttccctgctaccagtctgatattctggtcaatcctcctcaacttgttcaacatcatcaattctctcatatggcccacggacgacgtggcgtcgtggtgggatggagctggtctctgtgatatcgaggtcaagtttatggctgccggctacgtgggcatcccaggaagcctggcatgcatctttcgaagtcttgcaatcgtactggatacagaccgggccacattagtcccgagcagaggtcaacgctggcgcaaccagtgcatggagattctgttctgcgtggctgttccagtctccgcaatgatcacacacataatctggcagaagagccgatacttgctatttgccatctcgggatgtgtgaacaacttcgacgagagctgggttagtctcgtctttgcatggatctggccgccgattatctgcctcattgcagcatactactgctgtaagtatactcccaactcacttcaaaaacactccattaaccaaatatcacaggcctggtcctcatccgcgtacacaagtaccgaagcgacttcgcaaacatcctccgcgcctccagcagcaacctcagcaaatcccgcttcctccgtctcttcttcctggccctatcaatgctcgtctgcatcctcccacttcaaggctacgtcgtctacgccgacatcatcctctccctcccctggcacagctactcctggagcagaatccacaacggagaatggaacaccatcaccaaagtccccatcgacggcacagtcttcttcgaccgctggacccccgtcgcatcaggcttcatgatcttcatcttcttcggcttcggccgcgacgcaacccgcatgtaccgcacagtcttctggtacctcggactgggctactgcttcccgagcatcgagcccccaaccgatacgcacaactccggcccttcagcggcgcacgcctcaacagcaaccacgctcgtcggcagcatcggctcccgtgcgaaatcaatgttctcgcgacagaaggaatccttcgctacgtttgtctcgacgcatggcacatacaacgatatcgaaaagggctcttcctcgcccttgtcccgttataccaggtctaccaggaactcgcgctggaatagcttgccctggtcgctctttaacagacgccagactcgtcaggatatagatgggacgctgctgaatgacctccccgttggtacttcgctgactgtatcctcgaatgcttgggctagtcgtcgtgatagccgggatctgtctagtggacctagttcgcctgagcttagtaaggatttcattcatgtgcgccaggttattagccagcagagcgaggtcaggattcaggtctagtgggcttgttcttcttctggttgtatctcggcttgcagtggtttcattacggtttgctcatcttgcgtttgcgttggtctgggtcatgggatctgttgtctagcagagttttacttaagtatcataatacataatttgatttgcgcagttgtgccccacacagaaaggtagaagagttcagcgaaggcgtagtccccgggttggtggtaggccgggatagatcctgtctgtggcttatatttcgctggtataaagtgaaataagtcacaacttgaatctacgaaggccaatattttgagaccaagaatcgagatttagcatactaagtctacatcacacgctaccaaaatcaaatcatccactagaaaacaaaatgtatccagggtattgtacatattatcacaccgcaaaggaggattcaatcaatctcaccagccacgaaatataactagcaacatattcagattgatcgagccccaatcaagccatttactgagactcgtcggagtgaccggagttatcgggccgcttaaggacctcgagagtgcctagaagaatgttagatcgaacccttttctctcttgctctgggaggctaggagcagatccagtaaacgagagatcgacatacgctgcacaatgttcagagtggaccggttttgaccctcggaatcttcccaagtggacatcttagcatcaccttcgacgtacaggagggttctgcgggagaaagttagctcatctgcatcaagctaaaagcttaaatagctgcattggcgcaagttgacaggaaattgagcagggtaaccccataacccaacctctgctcaaccacatgacatgaaagagtaacgtctcatccgaaagcgcgtcgcttgaccgccaaatcacctatcatatgttcaaccaggcccgcgttgcagatcatcatgcagccttcaagcgcaagctctcgctctcgctcgcgatccgcatagactgcacacgcagacccaaactcaaacgacaagatatagcaaacacacgacgaaaaagacgcaatccaagcatgcagccgcacaagccagaaaagtatcacgagtagccacttaccccttctgcaagccaaggatgaaatcgcgctggccgccctcggggacgaagtttacgatgcgccaccagctggtctgacggttctcgcggttgccgtgggaagtggcaatggtgtatttgatgatctcctggccggaggaggtggcatggagctcgggctctgcgccgaggcggccagtgagggtcaggcgggcgatggcccagttgggcgaggtgctgaaggtgcgggcgtaccgggggatgctggccaggctcatgctcaggttcgggcgcagggaagagatgaaggtagacatggttggatggaggacgtgtgaattatggtttatggtaaggatggattcattggatttgttttggcgtgtgaacgttgttgaccataacacgtgatgtgtacatgggctaccgctttcagatgtgatatagtggcagaaggcactattaggctggctatcaggattattattggttattatggtttgaatcagggattttggttgcaattgagatatcctgtagattgaaataagtgctccatatttatttggtgaagctcataagctcatgcgagagagctatagctagctctaccccggaattgccccttgtgcagggttctatctacgggtgcagacagctagttataagcatcagaattagaaatccaacgtctcgccttggatgtcccgagtcaaaaggaaaaagaaagcaaggacaagcaagcaaagaaatgcaaatcaaacgacgggcctaactctattattttgaaatccttcataacgccatgtgaatgccaacagggtataatatttttagcccggtcacgtcagtccatcgcatccgactctcccgaaaactatatggatttccgcgtattccgtataggtacaattgtacaattgtacaacatgcaattgtacaccgtcagcagcactaaagtggaaaaagcagccgataggcagatcagccaggggcagatcccagcagagatgctgcaccgctgctgattgactgaaccagaccgagataaattaagatagctgttgtctcagatgcactccttacatggtcaattagcggcccaaccacgtcgccgcagatggggcctttagagtcaacaatggttaacatggctaacacggccgacatttgcaggacaataagattggtcaagtcgacggtcaaagtcaaattgattcggctcaaacctggaaggtcaatcgccaaattagctgaatcgatagatcggctacaggcaaagcgcggcgccacccgaactgagagccctggagtctgctgctgctgctgctggggggtttttggttcaccgcgaactggcgacgtgagtataaatgacggtgaatttgctcagaagggatgatctgacagctcactcgaattgaaaatgcagatcccagtgtgttgttcaacttaaaggaagcaaaaatcagaaattaaaaaaaacaatagtcccatcgagggcccgcaataacatgtcgtttcatggttggaatctccaatactatccacaccagggacaattaagccacagtatggagacatgaggatattctctctctctctttggtccgtgccagtgatgctagtccaagtcaatccaagctaatccaagttagtccaagttcgtccttgctagatcggctaattccacgatcggtggaggcaaagtagatagctcagcttcgatatacgatcgcgtggcttgtaattttattatcctctcagattccttgaattcatgctggggctccctcagctgtaaactcaaatatgaaagccctgttccattcatccttacgcgttttggtttatatgtaggggaggcttagggttgtctccgttggtcctttttttcttcttcctccttaccctacaatgtgtccctgaccgacgtcaattaattctcttttttatttttaattattaatatttgtctattccttttgtctgtattaatttcacgcgccgtgtgactgacaccgcgggatatgtgaaaggcgtgcaggccttagaatacccaaggacatttgcatttcgcttcagaaactggagtcaagatgcggtggtcttttatattcgtcttaatagtgtccctgtttctactagggacattggcagcgccagcttcgcccgcgggacgacgcaatgttgcattcgccaacttggaggtcagacaggaaaaggaaacggattctacaaagacagacgctgccagtgagactacgacggcaacacaaacagatacatcaaaaacaacaaccgaggcatcaacatctgccgaaactacaacgacaggcgctactacctcgagtactgattcgactactacaacgcatgcgacaacgcatgccacaacaacgacttctgccgcttctgctacctccactgtaccttcgctcgacggagcaactgaatcttctcaacaggaagcggcagactccagtaggccgacctactccggtggtctgccaatcaaaccagtgatcacgccggcatggggtgttgggggagttatacttattgccctcggggctgttctggctttcattggtgtccggcaacaatggtatttaagctacgattctttgatgacaatagcattttctaacaaagaaaagggtccaaatcttcctctcaaccggatttcttagcgcattgggagttaccgtaagttctatactcgaaaatagcaaagagcaaaaactaaccaactcgcatacaggtccttattatctatgtgatgagcccaccggtcagcaatgctgtacagggcggttacctcgtcgctgtcttcttcaccggcgttgtgttcggtgctttatcgctcgtcttcagagagatatgcgagggactgggctgtcttctgggcggtttctgcctgagcatgtggttccttgccttgaaatccggcggccttgtaaccgaaagtggctccagggtcggtatgatcattgcctttactgtaggtttctactgcctgtcattcagccattatacccgatcatacgggttgatcggttgcacatcattcgccggtgcaactgccttagtccttggaatcgattgctttagcagagctgggttgaaggagttctggttatacaactggagtaagtctaacaatttttcccaactgttgatagttgctgacagacccagacttgaaccaaaatgtcttccctcttaacacggacacttaccccgtgacacgtggtattcgtgttgagctcgccgtgactatcattatcgctgttctaggagtaatctcccagatcagactttggaatctcatcaaggagcgcagaaccaaggaagaagaatcccgcctggaacacactcgaaagatcgaagaagaagatctcgaaatcggtcgccgactcgaggagaagaatatccaagaacgtgctgaatgggaactcatttacggaaccggcaaagccgccgatggcaaaaccgcctcggtttcggagactgctgttgatgactcgcgacggggctcggaggcgtttgagtcctctgacaacgacagggagggtgagatcgagctcaaggaaatctcgagccccgatgcttccggtagtggttctgatggagagaagaaccgccagggtgaaaacggtactcgcgaacttgaggctgtgcctgaggaggattcatcccaacagggtcaatcaccagatgcagaggaaaagggcgtcgagcaagagggtcgatctgaagaaaaggcgccgagacctaccacacctgttatgactcatatccttggtgagggcaatgatgagtcctctgagatcggtgctgagatcggctcagaggtcggcacgccgcgctcgaaacggttctccggcagagaaatgttgaaccggatgtcttggcggctcagcaatggtgttatgacgacttcacagtcgcaggagaatctggtggctcatgatgatgccagctcttctgtcctgggggttgtggatgatctccatgagatgagcgtcggctgtccgagtgttctatcggatgcggatgttcacgagcaaacgcgcgaaattagagccgagttatctccagagaaggactcggcaggtgtggacatcaagtcaaaatccggctcacaagccgtccaagatgttggactccatgtcgatacagccatatcccaggatgccgagaaagtgaccaccgaagaagtcgatactagcgacactgttcagcaggtgtctcccgtcgagagcactgttattgccaacagtccccttgagaattctggaatttccgaagtgtcggagaagccacaatcgccagaaacccccgcaacagatgttcaagcagacattccagatgcctcaaagaagatcggggaagtcaagcccaaacctacattggagcagtcacctatgaatgatgcagaagtggaaaatgtggaggccaatgaagatcaacctcctactgctaaaaccatcaaggccgagtctattcctgagtcgaaggctgcatctttgcccgagcccaaggttgagccaaagatcaaagtaatcaaaaaactagatgcgtcaagcatcaagcacatccccgagcaaacatcacgagtgatccattcgtaccggacgaacgaatgggccaagcatctcgcagatgcggacacccctgagatggagccgcttgagttcgaacctgaacccgaggcagaagcctcagaggaagttcgcgagactgcagcatttgtcgatgtaggcggtcttctccagacgcctcttactgcacaaccaccaccaatcgtgaacagacctgaatttgatgatatggacaatcaacaaccatacatctcatcgacaccctcaccagatattccccgatcaaagacacggacaggcacgcaaggtctcagcaaagcgaatccaagtctaacccggaacgattcgacagcttcggtcaatatgctaccatcagcttttaatcctttcataacccaagaaccgggattgacgtcgatgcgctgcgcatcgactcccctgttgacagtcactactcccaacgagcccaaagaagcagagccatcatcacgctggaacgggccacctccccttctcgcaatccgcgagaacatggtccgaaaccgcatgtcctcaacatccaaccgcttcgatccctgggccgcacgcaacttatcccgacagtctctacctgatatggcacccctcgtctccccagtagcaccagtatcaccgccgctctccatcccggaagaaaaggagatagaacccgaacccaacgaggatgacatcccactttccaaacggcgcgccctgctacagcgccagacaatgcggtcttcatctgcattaagcattgagaatctccaggctgcccagtcccctatgtatcccccggcagaacccgccggcgagctgaagcggtctgcttcaagaatggcagcgtggcgacaatcggtccgcgaggaaatcacccaaaagcgaaatcctttggccatgcagtccccgcccctcagcccagctggtccccccgaccaacggcgcacatggagctctgtgcagcagatgcgcgaggcttcgtctgctcagctgggcaatgccatcgcagacggcatgcagcgtggcaacatgacggatctgcaccgacaggcaatgcgacgtatgcaggcctcagcaaatcgaaagctgtagtacctatggttcattcatttttctcaataccccttgatttggttcttttttaccaagcgttgttattacacgccatggcgaatgtgtgtttcctacgactttatgaagtatttattgcatcaatgtctataatcttatttgataatgtatatctttgcccaattcgcgccatgcaagtaatacggcctcaccgagcactgccgagacttggtctgaattgaaatgcagttcgtcatatcgcagtgcatggtgactactagggttcctattggcttttaaggggaatcggtcgtagcctatagaataggatgaagactatgactctacggagtaataagtcggaagatcttatggccaatttccgttggtaataagagctaagaggaccaaagtccctaacggtccttatgcactgcgatagtcatccctaatagtgcaatagtacgtctattagcgtttgctagagtgtgcatactaccaataaaggccgagatgaaacaagggacggtggattcatcacagtgaaaccgggggcaaacgacttgcatatcaattattatattattggacgtatatccctttcgagtctctgtcattttgatataagatataagatgcaagatccttcttcaagtctgaattccggtttctgtctatttagccagagtcgagactcatatacgccaagctagctgcttctataagatttacaaggattttgtctcaaatttcacctacaaattcaaaccttctttcttttccctaattcttttctaatatcatttctcacactcattttgctgtatgtccacatagggcactgttctcttggccgatctccatctccgctccagtttcccccgtctcctttctcccctcaaaacggcgtccttaatagtccccagacctctgtcgagggaggaagaagcatactgttacccacgtggccaacaattcataaaccggcctccaaccaatcgcgcctccgtggagtcaactccgtcattcgttcgcgcccagcggcgacagtgcgttccgatctcaggcccgccgtcgctcctccgcccaccagcagtccgactcgcaaacccagtcaaccacgtcccacgaataacccccataaccgtccgcccccaacaatccgacgagagtctcccactcagcttcgaccactcacgcgacgtccaccccctcctcagcgtcccagagcgacgccgctcccgcctaagcccatccccgaacagcctactcgtcgagcgcagccagggggaaacagaaagtggccggacgagcattgccctgccccgacgacaccgtcgcagcgaagagttcacagaaatgacggccgcgttcgcgggcagcgcagcgcgcgaaacagagaacctgcgccctcccgaagctgtccacctcacacagagcggcacccgacagaacgaccgtttccgctacacccagtcccaaacttccttccactcccagtcccagtcccagtcccagatcgcttccgtcccgtcgcatactgggtacccgcatgccgatgtcgctgaggagctcgcatggggccctgctcacccctgttttccgcatattaatccccatgtgcctctcgggtcgcgggagtacctcacaacgcgcgtgattcgcatccggcgagattggatgatcaagggtgatttggcgccgacattttcgaatttgtatcccgagatccttgatccgttgttgtcggagcaggagtttcgccgggtcatctctaccgtcaatggtggtgttatcaaggcgtttgatccgttcagttttcggaattggttcgatagcacgatgggtttgttgacgggctgggtatgggatgatatcaatgcccccgcgaccaaaagccagttgcagcgtgtcgaggcttggttggagaattggaaccgcgaggtcggtgccaaagatggtgttcatatctggagcttgaggcggacggcctatatgtcgcttgatatccagattcccgatcccaaggttggcattgtacccagtgaagccccttcagctgctaataccaggccgagtactggtattggggctggctcttgatggtgtcgggctgcaggcgccgttttgcttttgctttctgattgtacatctttgtgatttgttcctttactgggatctctgcatgatatccatcccgcgcgacactgaatctttcgctatatacctttcgtctttggagtccgaggttttccttttaatatttctgtgatctgatccctttctttcatatctcttctgtcagcttcatctacatatccctgattcccctggggggctactttaccctgatttcgaactgtcatcttgaccatacatctttgtccatatccggctgtcatactgcattgtcacctctagacttgctaatcctgagaaagaactaactacattgcggatttctctccgccttaatgctccctccacgttgatgttcaataggagtagagcagcccatggtccatacaatactcgtacattgagcgtttatgcaagtcagtgttcgctttgcctgcaaaacattctatggtaggttcatgcaccatcgtgatacttcatacattaggcaaaaatatcacactacaaacaagcatatcttcaagctcaaacccaattacagtccaatattcctaaattgtcgacaccgaggatagcagaaaagatccctccttcctagactcaacgcttacctcttcagccaactaaaaatgggtgattgagaagcccagtaattgattcccgatcttccggacgttcctgcaacgtcgaccaaagaaaatctgcaagcttctcagtattgtctttaccaaaatcagccggtaatctctcgctaatgtaaatggcaaatttttcattgccgtgctcaaataggctgcgcatgagagatctcaaattcccatgaacctcgtcaatcgtgcagccaaaatattctaccgggaagagtggctcgtttgtagcaagctgaaatatctgcacttgatggttagatcatggtaggagttaaggatgggatagattaccaaacaccctagagcccatatgtccaccttttcattccacgaatggggttgaattaactcgggtgccctcgacgccattggcgtgacaggaagaatatcatgatgtatgttccatatagctatggtaatagtcaataatcgacattctcgcatcactaaaagggttcagacctccgcccatatcaccaatcttgactataagtgtcgagaaggccgcatcgtctagcattccacggggtcactgcgagctcataagataccgcggagcactgtcatccacttcaactcctggaagccaattgacatgactaaattcgggttcttctatcatttcgctcgataagtcgcagttcagggtgaacaggatattggctggttggaggtctgttcataaatcaatattatcgtcttggtcatttagtcccgaggatacataccgccatgaataaggccctggtcgtgaagataattcaacccgagcaatatctgtttcgaaacctcacgaacataacctgggcagcgtggtttttcccgaacagtcattgctccaccatctgatatcatgactgggaacacgagacaaatatgtaagccattaggccctttgtgctcaaagtgatctaatagttgcaaaacgtggtttctccctggatggtgtgtatctactttcgataagtgaaggaggatagaacgttctcggctgctacttgggatatccgctttgagaatcttcaacgtaatatatcttccaagcctaggcacaggaaggagtaagcttgatagtcgcgggcaaaatagaaaaatgaggtgaatacaaccttgtatcttccgcaatccaaactgtggaaaactggccgaatgcccattttgcaacaatccgatacctgtggtggaaagtgtcctcgaggtgaactgggtggtagcctccgatacgatactcttcaataggttcgacaacattgtgaatgcgttcgaagcgacgcattttcctcaatataatttattcgtacaaggcacgtctgtgtcgctgggaaaacgtcggtgtggaaagcaaggaatcaatttgatatctacataatcagcagcaaataggaggcacgagaggtgggtaaccctagggcacccaatcaacttgtagctcgtacatggcactttcattataaacagcagaagcacaactgaatttccccagtaaagaaatgtgtcactagtctaaggtagtctcttcaaggcttcctggcccttctcattcaaatccggatactgccttagattacacaaatccctccaaaatgccttaatgccttggcatcttcatgtccctcgtcatgtacgtctaagcgctcttgcaacaactttttccattcgacatccataactgtaaatccgaaagaggctgcgacatattcataccagataggaagataggcagcgtactcccagtcgagtatactaatgacctttccatcctggatcatgatgttgcccaaattgagatcgcaatgagtgaggacatacggctcgcatttcggtcggcgcttctttaagttatccaacactttgagcggtagatggtgaaggtcaaggctaagagcatcccagagttcttggtcggagtgaaacggcccatgcggttcaagattgaagaatagtaaagtgggataacatgggctatgatcgacacattcgatggagggtgatgtgacagatcgaagctgcttacgcacttcaacaacttgatccgtgatagccactttttggggctccgataacgaaggccatgcctcctcaagtgtttggccgcgtatgcgttcggtcataacaaagtatcggccatcgtaatcgacccaatcgcgcagaacctttggaactgggatatcgatatgggttgccaggtaattcaaggttttgacttcaacttttgcttttagaccctcatccaggcggtctttcagaatcacatcagaaccgatggtccaaacgccccgttgagatgcaccgtagaaaagtctaaggtggctagagtaatggcactgtttttgtttggtggatgtccagccgcacgcaatgcagccctcgacggatggttcacccattagagttggaggttcaacgggggtgatttgttataggtggaatttgatcgaggatgggagatggaagagggaccgatttttcaaaagcgaaggccttcctatgaagtaatcaacaccgtttctaaggctcaactttgagataatcgaggtcttgaaaaaagaaaataattggtggaagccgtgggcatggccgtcaaggccgattttgctattaagattcgctctgcccacgcgtatctatttcactggtttctaagcctcgtcgaaaccaaaagagcggatcagtatgtaggcagttttgagaatggaatcagactattcattgatgcagtacaggctgaaagttggttccagtagaggtttcgtgcgttccctaatgagcagcaaaccgaagtttttagatggcagaggaacagttacctatgtctctctccccttacatatgaaatagccattaactagttagttatagtgagctggttagttatcgctaactatataggtagttatggttgtcaagtagttacacaagtagtcaagtaagtggcacctccttttatacctcgggcggtgtcgatccaccccacccctgtttccgcagctctccaactcctatcaggagcagcaactcgactcactaaaacattatgctctcggggatcctcatatttaaccagaagggcgaaaacctcatttttcgcgccttccgcagcgattgccgcccgcgtttagccgacatcttccgcatccaagtcatctccaatccccaggtgcgctcgccgatcctgaccttgggctcgacgacctttagccatgtcaagcacgagaacatctacttggtagctgtgaccaagagcaatgccaatgccgcgctgattttcgagttcctctaccggctggtcatgctgggcaagagctatttcgggaagctcgacgaggaggccgtgaagaacaacttcgtcctgatttacgaactgctcgatggtatgtggaaaaggctcaatgttctagaaacggagcctaacaattggtgatacagaaattctcgacttcggatacccccagaacaccgatccagataccctgaaaatgtacatcacaaccgaaggcgtcaaatcggccatcaccaactccccatcagactccgcccgaattacccaacaagcaacaggcgcgctctcctggcgccgctccgacataaaataccgcaaaaacgaagccttcgtcgacgtaatcgaagatgtcaacctcctgatgtccgccacaggcaccgtcctccgcgccgacgtcaacggccagatcgtcatgcgcgcctacctgaccggcaccccagaatgcaaattcggcctgaacgaccgcctcctcctagacaccggtgagacctctagcaacatgaacaacccaggcggcggcaacggagtcagcacctcaaagacaacgcgcgccgcggcaggctccgtcacgctggaagactgccagttccaccagtgcgtgaagctgggccgatttgacgcggaccgcatcatctccttcgtgccgccggatggcgagttcgagctgatgcgctaccgcgccaccgagaacgtcaacctgcccttcaaagtgcacccgattgtgcgcgagatcggtaccacaaaggtcgagtacagcgtcgccatcaaggcgaactacagctccaagctcttcgctacgaatgtggttattcgtatccccacgccgcttaatactgccaagactacggagcgcacgagccagggccgcgccaagtatgaaccagagcagaacaatatcgtctggaagattgcccgcttctccggacagtcggagtatgtgcttaatgctgaggcaacgcttacgactatgacgcatcagaaggcttggagtcgtccgccgttgagtctttcgtttagtttgctgatgtttacctcttcgggtctgctggtgcgctatcttaaggtctttgagaagagtaactacagctctgtcaagtgggtgcgctatatgactcgtgcagggagttatgagattcggtatgtgtttatcttttcgctggtcatggttttggtcgctgactcaactgcttcattaggttctgatgattctcgaaattttgtgctgattttgggttcgtgtgggagaggattccaacgagcagtgttgatatcattggacttgagtccagtttcatcttgttatttttactttgcgcagcacattggtgtctggcgttggatggagccatatacatactggattttttaacacgtatccaattcttcatttcccgtaccttagatatatgcttgtaggagtttgaggttgagtaccatggcaaaggtttgaattgtgtaattgcatgttttcacttggctttaggtatatccatcccaaatcttagatacgatgagacgattgtcacaatagcatgcatgaagcaattgtcaaatctgtagttactatcttatacttgttcgagtgatagacaatgaaaatataagtaaagttggtagtagtagatagtagtacaattcccaaacaaacgacagtagatgtggaagaataagtcacacaaaaacaacagtatgagcaagaaaagaagcaggaacatattcacatagcccgagtagaacggaactcacagcaccggacaagcagacgaaagcaatttgtgctggtcaatagacaacagaccgaaaagaaaaatgataatacagttggtgttccggcaaagaaatcaagccaagtcaggccaataggaataaggtcggtcacaggtggtacagagatcatataatacattaagaaagacaataataattgcagtaagcaatattcaatattcaacgccgactcgagcgcaggccgatacgaccctcaccaacgagggactgccacctgggcccaacgtggctgcggcccatttggcgcgcgcactcgtcccagtcttgttgggagaggcggaatttcccgaggaccagctcgagaagatgttggtcttcttcggcggtccagtcttgtggagccgaaggagcacactcgtctgttacctcgatggagggcagaggcgcgtctgggtcgacgcatggaccagctgggatgtcatagtccatctggcgacgaggaggagagggaggagattgggtgacaggaggagaatgtagggagtaaaagtctgtggaggaaaggccaagaggcatatcggaggggacgtgacggcggcgtttgggagtcgcgaagcggttgcgccggcgagtcatctccgcgtcgctgtcatcgccatcgagnnnnnnnnnnnnnnnnnnnnnnnnnnnnnnnnnnnnnnnnnnnnnnnnnnnnnnnnnnnnnnnnnnnnnnnnnnnnnnnnnnnnnnnnnnnnnnnnnnnnnnnnggggggcggggttgtgggcgggcgcggcgggcgggtgcggatggaggaggagggggtgtgagagcggcagttctgggtggtggtgtttgtctaggggagaccgggcgtgcggccttgtgcgatcgcggcgagcgacggggtgtgttgagggggagggggctctggaggcgttgagatttcacagatcgcgatgaaggtgtgggcgatcggttgagtagagattgtagtgcgcggcaggtgccaagaagaccgttgcccgatgcaaatcctgtgccggatgggggaggagttgagaataggcggctgggagtgaagcgagacgactggcgcacatcgcatgggagggcggatgggagaagcatgattgtagatataaattgaatgcgcggtttgagtggtttgaagttggtttgaagatgaatgggatcaaagagagtcaacgtcgagttgttgcgcggtcgcgcgatttgtgggtaggctgtgattgcgccggaggcggttgcgctgcgcgacgaggcagttggggatgcgaaaatgaatggacgatattgttgttggaatgcgcttcaagttccaccttttccgggagatgcgacagcaatttggtgatatggatgttttgacagtgagtgtgtagggagaagaagttggagggggaatgcggcgataaaaagaaaattggggccgcaaacggtcaagcgaatgatctcccgtgcaacgtcaagtttatttccggccacaaagaatgtgttcgatctattattgacttcaacaagctcaaaggaactatgaaacagttgaaacagttggcagagttgattggaaaaagaagggaatgtgagagacagatctcagggtcaacgaaagtgatgaaggagctgaaggagctaatgggaggagctgatggtaagaatactaggaacaggaatgaaggcctctctattatactatctacttgaaggacctgaaggacttgacattgtagaccagtgaaacagtatactaaggagtctaggacaagagggattacatgcaaggcgcatacaaagaggactacaggcacgaggcacccctgagacactttttccaattacacttcctatttaggcaacagatcgactctgtgcacgattttctttgaatttgtatagtatgatcagattgtattggtgtattgcaatgaagtcagagcctgtaacatcaatggcttagggctgtataccaagtatccaagtacagccctggttagacgcgatcataccatttctttgatttcctgatctcatcattgccaccgggggaagtcgcgttttaataatgatctgaaagaggaggttcccttcctactattctcctacttctcctacccttcaccaggagatttgttccctgccatgccagccctctaggactctaggactatagggcctctgaacactgccacttgtgtgatcctactcatagaccttgtaaatagcttagtggcatagtggagtggaatggtggcttcataattttcagcgcgttgacgcgtctcgcgtttctcgtgacgcgacgcgacgcgccaagactcatacgtgccctaacggcgtccatactgtatagaggttatagtgaatattactacggagtacagcatgtatgtgaatacacggaccactacggagtactcgtgggtcaatgcttagaatgccatgtgccctataggatcaaccagggtcatcccactcgggggattttctatactgtactgtaagaaattccattgcccttgcttctccttaccgggtttactctggtcaactcgtgcaaagatacagcttgcattatcttgcagagctctgcatctaccacattgtggggtgcagactggctgcacactgcgggccgacaagcattctacagatagacttattgcgatacaagcagttggtaaaggatattccagttgtgcctatcgaaaagggcgttgtgtctactccttgtaacccagcttgactagaagggctgacagcgccactagacctgtgatcattcaaagggactcagtacaataccgagtggagagccttcgaaatgttccgcagcctccattccaagacccgtgccccagccactgatcaaaatccaatctcatgcaaggggtagcccgaggatgaaactgcttccaccgagaatcattcatgagcacaaggctaggcttcggtaacatagggtataggagatacagagtccagcgcaacgttagaataaacacaaagcctataatagacgagcgtttctaatttccaacgctttcgtctcctaactatccatggatcgatgctatctaagcttctcctgcagtggatcctgcggcgctaatgcaagacatacgccccttcccacgggcctcgatgtcgatcgtctccacattccttcaatcggcaagccctaatgtggctgggactgtacttgccatagggcaagatactgaggtctcacacgttcacctttacggcctcatcgcctcagacatcgctcaatatggtagtgctcttgccccatcatcccctccctgtcttactttgtgggccaaagatgtgtggtttggctggcgatcaccccctaagatccgggtcttctaccgtacatcattgattatcttttctttttgttgagaatactattacagctgacaggaagttgtgattgggtctagggactgtgttctacggcctcgtctcagagaggctgtagtaccctaccgaggctcataacacttgagtcaacctcccaatcgcctgaccaccaattggcctgaaagtgagaccatctctccgggcttgctaccgatcagcactccctatttctgtatcgaggtctacccctcttctctacccccctgccctactgctagtgctctcatagtcacacgataagggccagggataagaataaagaggctacccaagtagaagtgggctcattacaccagaccctggcttcatagcgcccaatggacggtggaagccctcctccctatccttatccgtgtggtcccaggaagagctattgttagctcccctcgctccctcctgtcctctgtgggtttgtatgcccgaaggatcgcgaactattgcaatttgcctgtgtaacttgcttcctagggatggtcattgggtgacgatgaagtaacttatcgctttgcgtggattctccccgatgatactggttccaggttctcaaactcttaataatcttccgtacttgcttccaagtagagaacttctaggctcattgctaggaatattggcggtgggaaagaaatgctaacgataattattttcttcgccccatggcgaacatagagccaatatctacttgggaatggaatgttcatggcaatagtcacaccgtcaaaacttcaatgctcaaagggtatccaatatagcctcattgaccttgcattctcttaaaacgctcctccgcagccctcgctctgcgctctctctccaatcgcatcctcatctcaggcgtcatacctctagtctcttcatctctcctttcggctgcagacttctcaacggcgcccacagtacgaccgccagacttagtcgttctcggcttcgccgccttctcggcctcttcgcgttgtaggcgatccaagctagccttgcgccgggtagattcttcctcctcggctattttacgttctttctcggcccggctctcagcgtcggctttagagaccgccgatggaaccttggctacttcccagtcccattttgactcgccgagatcgtgacgggcaatgcggaaggcgtcgcgcgtggctcgatcgccggtgagttcgaatggagttctgccttcgttgttaactgccgttggatcagacccggcttttgtgaggagagccgtaactacggctggtgcgtcgaggtttgcggcgaggtgaaggagtgtagggcaacggaagttttgtggcgagtcggcgggcgtaaaggtgaaagaagaaggtatagagttgtttgagatataggacatgagggcgggaacctttgagcggcgaatgagcgcctgcagttgggatgtgtgcaacaaggcagcttcctcttctttcgagagcttcggcttctgtggttgcggtttttggacgtgtgtagatgattttgactcctgctctcgccgcttggcttcagccgcagccagtgcggcttcgtccacctcgctgaccttcattctggtcaactccttgaaggaccgcataagttccccttgagtcgcacggcgagtattgaacgggaaccctcgtaatcgggggtcgttctgcctgaggacctgtccgtcatattgaccgaaaagagtcttgcgatttgtctttccggtagctcggacgaacaacagctcggctgtgtcaatcatatctttccactccgacaacacatctctgatatccttctcaagtgcagcctcgttgtaccggcgcagacttgaacctgccgaatgggcagcacgacccgacgcgtcactggcagactgtgagccaccctgctttcgccgtgtcgtgtatcggtggaacgttttgtgcgcaataacccgagcctgcctgtcttcaactcctccttgctttcggtgaatctccggtgccagcgaaaccaacatagccgcgaagtggccaccgccgatcatgcacatgaaaatatgcgggcccgaagcagcggggtcttggacgttacttgccttattggtgcgcgctttgactggcgcaagctgcttccgtcggagtgtatcaaccaggtgagcgggctcgtcctgctcggcatttgagaaaatggccctgtagacgcctagggacttgtttgatggtaatcccgagctagacagccagaatatggggtgctttggagcgattggtgtctcagtcgcttccggatcctcgttcgggtgagacagcttggcctgcttcttcagcaaggcggacagcgttgtgcccgcggccccctctgcatcatcctcctctgtctccgaagactcagaaccagatatagactcatctaactctccaatcgccttcgcgaattcgatctcttccagaggcgcattcccgcgcagctgggctttgatgttataccggtgatggtccgagcggacatggctgcgctgttcctgtacactgttgtaagagaccctgcagagggagcataggttggaggttgcgatcgcagagtcctgtgcagctagttcgaggtctatcggagagggttcgggttcttgttcggcgacaggttgactggtcttggccgttaagcttgcaagaagttctggcggcagatcgtagactggaaagatcagcgaaatgaatcaacgaccatatagggcttcggaggcgtaccataaagaggccttttcaggagctcctccatttgagtcgtatcgaccatgatgggctggacgaagaatgtgtattgagatcgtggtgcccctccaatgacgctgttaagtgggctcttaccgcctaggagcaatgcagtactatgtggactctatgcgcttcgctcgcttttatgaaaagatgctggatctgcaataattttgagtcatgttgtggagctttgctcagcctcatttaggtccctgagagcgttcattttccatattaattccaggcttgtgggctgtgctcgcagatattaacgagtcggcctcccgattaggaaatcaaacccatggacatagtcatatcctcggtattatgtttgatacctttgtagggcatgattatgccgatgattctgattcttttccctaaccctatctcaatctatgttatgcaatcttttcttttctagtacctgtcgtcatcacgtgattttcgaatgccgtttcagaatcacctcgatcaatggcctattagccttattagtacacaaattcagtccatcaccgtttttttgcctgttctgtaggatgtccgacttacatgctttgcaggtcgatttgttccttttggtaaattctctctgcttgttatggtacatgcatattttaacaacattcaagggaaaatggcaagatgactcgtcgctatcgactgatagccaacgaaaacccttggcccctgttttatccagactaccacatacagctaatcataaaccgcatccacatcgttgataaaacagcgcttgcttccgagggccccgacacagggaaggttcttgtggtgtttgttgacaagggcggacgggcaatccactattctcgcctagagctaaaggatgcagcggatattgcatatctcttgaatttcatgcttcaagaacatgggtgttgggtcaatgcgcagattggccaatcctatgaatggggggcgcccttgagaccccctatggcgagaatggtgtgaggtgaagatacccaagcttcacttcacttcagtaagtctcggaaactagtcacactccttgaataccagagttaccagggccgggtaataagaaaggtgagtctccggtgatagtagtctaaacggagacctcaagatgcaacgtggaaagcggattgaaattggaggtgtggcgaagtcataatctaggcactggaaacccatggataacatcagcaatacctaagggtagctcctacacgggttggcatgaccaacgtctcttggccaatggcatatcgggaagtgtccctaggagctgtgatatgaggaagccaaaagtcttgataagtaatcaactgatcctctacccacagacgccaacgaccaatttgcaggcccgcagaactcgagtcgtggattgaagtgagtcttgtgtaagaagggtctatctccaagatagttcttcctgcaataccttgctcctggcttgatgcctgtcgactcgtacgtgtatagcccaagattattccattcccaccggaaccaggaacaatatttgctatcttttgtgcgagctcttgggcacgtttttgatatctgaatttggtggaaatgccaaagtactgtcggtcccaatctgtagtgaagggtgtgaggacgaagactttgggcgcgtagattgcattcaagacgccggggttatggtcggtcccaatcagagcagttatagattgtgcatataatgtcccatctcggagggacttggatgcattcatcgtgaacgagtcgtcgtcggttggattgaaagctaggtcaacgaacacagggctttcccaaatgtgcgaaaggtacacacccttttcggatgctataatcaccactgtacatccgtaaatgccctttactcctacagccgagtgaccaattgatggatagttaaaccattgtgcagacactggtccaggctggtcaatccaaattggcgccaagctcttgacatagctgctgtaaggaggagaagcgtcctgggaagcatatgcaatcaacgaactgatcatcattttctcatcttggctgctagagagagttgtcttggagacaggccgtgtcggacttgcagctccactagttgtagcaatctcacaaccctcggctggtagaatagtggtaatatccgttgggatcgactcataatgctcaatcatggccgccactcccatgctagcactacccagaaggcttgttctcatagagctcaacttttcgcaagtatcgggagggcataatactggagtatcacttgtcgaggtactggaaaatgtggttgctgacccagcgacagagtattcaatagtggtagcggtagttgaaggtaagcaggttgttgttgaaacagtggaattggtgtcagaagctaatggtttgagcatcatccgtatcgatgccatctgaaacgaactccaacggcacgtccaggcgggacgatattgctgcatctgagtttttgatagaggatgtttctcacccaccgtagtggtgtatagcattcctcgactgcagcaatatcgtaaagctaagacagagaaatctgtggacttgctacccaggctaggtgggtagtggtattgtggcggaagcaatattcccagtgttggtacttgctgatgagatctcactcgataatgaagcaatggttttgctattacttttcgagcaatgtgaatttttgcattgaatatcttcggttctgacagaaggagtggcagagtagagaaaggtgtgcatctcatgtcactgatacccaaggtggtaattatctggggactacgctattatattgaaagagctatatgcagagttcctattgaagacaatgacaataaagtttgtttgcttgggcttacatacaataggattgtgatcattgtcataaagcacccacttcctatcacttagaggctaataggctttacactttgggttataaacagttcatctaatttaagggtgtattatttgaatcaagaaagaagggtttctgtctaattcgtaggcctgtcttcctggtaagatcttggtcctaaggataacctcgaatacggagtagaataatgctgacaagtatattcatcaactgactgcgaatttagtgtaatagggtcaattgatttagactgaagcttgaattgagcagcgcctattagtgtgttaattctcaagacacgtacatcgcctagttagccgcttgatgtttgtctcgagtctcgacgcatattcaaacccgttcatcacatgactaacatcacaaggcccatgcgtctctttggcaaacagccgccctcgtcaagctctcatcttagacaaaacccaatatacagaaacgagaatttaccatctctgtgggaaacatgtcttcaaaacaacagcgtcaacagcagctaatgctaaatgcacgccaatgtcagatgcagatgatggctgctaagcaacaaccaagcaccggctgcaacagtggcaatcctctacagcagcaaatgcagcctcgatcagggacaatggggtccaaatatgatgacctacccatactggagcccactgatgttatctttatttctgaagatcctaagtcgactggtctagttcccgccttcttcggatcttttgaatccgcctgccagcacggcaccctctccaccattcagtccattgtctcatccaagaacctcacacctgcttttctccatcatggtcttacacgtgctctacgctccggaaatattgagattgctcgctatctcctagatagtggcgcaccaatagttcgcgaaactccaagcaatatcttctttgtacctttggaacagcaaattgccctctttgagctctttacccagtataattggactcccaatacaccaggctactatggtagtgtcctgctccctcgaattatcaagaacacccctcttcttcgttggttcctcgaccacggagccaatcccaaccttggggtgcagcagaccacccatgacaggtgtggtgggccagatacttcctcgtgtgctgcacttgaggcagctgcagctactggaggagttgaggctgtgcgtatgattttagatgcgggtgctaacatccaaaacggtgtaccactacactacgccgccggggcttgtcctcccggtacgaatccacatgctgggaaagtggtaccaagccgtgaatttgatactagcagaattccagtgatggcactactagtcggtcgcggggctgatgtaaatcagagagaagagtcacgacacatggtcgcgcagtatgcgattgtatatgcggcgatggcaggagcagttgagcgggtcaagtggttgttggagcatggagcagatccatatataaaagggaactggggcagtgcagctgagtatgcacttacctcggggaatgaagagataacaaaggtcattggggaatttaccctaaaaaaagcttgaattctgcagttttgatatagcatcaatgaggaaatatattgtgctatcatgtttcgaaaaattggttatttgtcgaagaaaggatacgaaaccattaatataaaatatacaataaacacatcaattttgatgatttgaattagcgaccagctttatatgctgtaaacagtcctttgaagccatcacaccttcctaagttggaagacaaccccgataagccgaaatagccgcatcggtattagtgcgcttatccccgaggattacatcattccaggtcacgtgtgaggtctgcaaaatttgtatccaggaatgaagcgtctaggaagatatacggagtagtcaattttatgttacgcaagtttcatacaaggactccagagaaccctgcatgtgtacattacggtgtaatccatgagttcgactccataggctctaatgcgcacggtaaccagccccgattttccccattctgaagtggagcgctgcccgttcttgcttttgtaagcagcctagcttggaccaacacccccgttttcttctagttctccaacttcgtatcttttcttgcttgtgcatagaaaggcataccgagccactaagaaaaaaaatgctggatggccaatcccaggcggtcctagaggcgtcccgcccggggcatctcttgcattcccttggatcggcacttgattcgcggcgacagcctttctgcacagatagcgagggctggggcccgctcagctcatcgagattcgacctgacaccatgctttcttgacgtgattgtggcgatagtggcagtttggggtacactgagtggactagcagcgttgtggttattattgtggaagcgggttccgcagcccgtatcgaagaattggcacttctacaccaagttggttagtacatatcggacacgcgcgcacacttgtggacgttaatttactgactggtgtttttgtcatcctaggctgttcttgccgctctcatcattgttaccgcccttcaagctgcgattcaagtcgaatcagaacccaaaatcttctgggccgattttcgcttctggtcctccatcctgaccatcatctcgctgggggtgataacttcagtgcaatattttgaacattggcggagtagacagcccaatggggtcgtcctattttactggcttttcttcatcatcgcctacgcggtcaaactccggtccctgattgcgcgcaaagaatacatcgaccaactcccttactttgtctgcttcaatgttagcttgggactggcactctttgaatttgtgcttgaatatttcgtacccaagaagcaaagcgcatacgatgcgctgggagatgaggatgagtgcccctacaattatgccgatgttttctcggttcttacctttggttggatgacaccgatgatgaaatatggatataagaactacttgactcaagatgacctctggaatctccgcagtcgcgataccaccagagccacgggcaatgccctgcaggaggcatgggatgaacagctcaagaaaaaggagccgtctttgtggacagcactcttcaaggctttcggcgcaccctatgtgcgtggtgcgataatcaaatccggaagcgatgttcttgcctttgtgcaaccacaactcctacgacttctcattgccttcattgagtcgtatcgaagcccggacccgcagcctgttatcaggggtgtcgccatcgccttggccatgtttgttgtttctgtctgccagacgagtttcctccatcaatatttccagcgcgctttcgacactggcatgagagtcaaatcagcgttgactgctatgatttatgccaagtctctgaaattatcaaatgaagggcgctcggaaaagaccaccggtgatattgtcaaccacatggcagttgatcagcagcgccttgcagatttgacccagttcggtactcagcttatctctgcgcctttccaaattactctgtgcatggtctccctttaccaacttcttggcccgagcatgtttgccggtattggagtcatgattctcatgattcccctgaatggtgtcattgctcgaatgatgaagaagttacagatcatccaaatgaagaacaaggactcgaggacccgattgatgactgagattctgaataatatcaagagtatcaagctctacgcctggaacacagctttcatgaacaaactcagccacatcagaaacgatctcgagctgaatacgctccgcaaaattggagccactcagtccgttgccaacttcacctggcagtccacccctttcctcgtgtcttgctctacattcactgtctttgtgttgacgaatgataagccattgaccactgagattgtgttccctgcgttgacgttgttcaatttgctcacattcccgctttctatcttgcctatggtcattacgtccattatcgaatcctccgtggctgtgaagcgattgatagattatttcaccgcggaggagctgcagaccgatgcagttattttccaagatcccgtggcgcattccggtgacgaatctgtccgtgttcgcgatgcctcatttacctggaatcgtcatagtgggcagagtgtgctggaaaacatcgattttagcgcacgcaagggcgagctcagctgtattgttggccgcgttggcgctggaaaatcatctttcctccagtcattgctgggtgatctgtggaagaaccagggagaggtgatcgtacgtggtcggatcgcgtacgtcgcccaagcgccgtgggttatgaatgccagtgtccgagaaaatattgtctttggacaccgatgggatccctcattttatgaccttaccgttgaagcctgtgctttgctcgatgacttcaagaacttacctgatggtgaccagactgaagtcggagaacgtggtatttctctttcagggggacaaaaggcacggttgactctcgccagagctgtatatgcccgtgctgatatctatctcctggacgacatcttgtcagccgttgatcagcatgttggacgtcacatcattaacagagtgctcggcaaaactggtctcctcggtggcaaaaccagaatccttgcaacaaacgcaatcactgtattgaaggaggctgacttcattggcctgctgcgggataagaccatcatcgaaaaaggaacttatgaacaactaatggccatgaagggggaaatttccaatctcgttcgctctacgatggttgactcggacgatgaaggtactgccagtgggtctgaagatcttgctagccccgaaagctcagtcacaacggccatcatccaaaacggcaatgcatcggatagcgaggaggcggaacaacttggtgaccttattccaattagggcaggaggtgaggcccgtagacggactagtaccgtcacgttgcgccgtgcaagcactgtgagctggcaaggcccccgccgcaagttgggagacgaggagaacgttctcaaaagcaagcagacgcaagaagtttcagagcaaggaaaggtgaaatggggtgtttacgctcaatacgccaaggatagcaatatcatggcagtcgtggtttatttgattgccatgatggctgctcagactgctcaagtggtgggcaacttctggttgaagcgctggactgagtggaacgaagcccatggaaccaatgctcaagttggcaagttcatcggtgtctacttggcgcttggcctgggatcatctctcttggtcattgtgcagaacttgatcctgtggattttctgctctatcgaagcatctcggaaactccatgaacggatggcatttgctatcttccgctcccccatgagcttctttgaaacaacaccatctggccgcatcctcaatcgtttctctagtgacatttacagagtcgatgaggtacttgctcgtactttcaacatgctattcgcgaactctgcccgtgcggtgtttaccatgattgtcatctcggcagctaccccggctttcttgctgttcgtcattcctttgggttatatataccttagctaccagaagtactatctgagtacctcccgcgagttgaaacgtcttgacagcgttacccgaagcccgatcttcgctcatttccaggaatctctgggcggcatctcgaccattcgtgcctaccgacagcaggatcgattcgcccttgagaacgaatggcgcatggatgctaacctccgggcttacttcccatccatcagtgccaatcgatggctcgccgttcgacttgagttcattggttcaatcatcattctcgcatccgcgggacttgcgatcatgtccgttgcaactggcagtaaaatttcgccgggcatagtcggtttggccatgtcatatgctctccaaatcacacagtccctgaactggattgtccgccagaccgtcgaagttgagactaatatcgtgtccgttgagcgagttctcgagtatgccaatcttccgagtgaggcacccgatgtgatcttcaagcgccgccctgccatcggctggccggctcaaggtgcggtggagttcaagcactacagcacccgctatcgacccgggcttgacctcgtgcttaaggatatatgtctcaacatcaagcccaaggagaagatcggtgttgttggccgaacaggtgccggaaagagttcgctcacgctggctctcttccggattattgagggtgttgaaggaagtatcaggtaaggacatatgccatcatttgcctttgcgcttttcaagctaacaaaaatttagtattgatggacttgatgtgtctacaattgggttgaccgatcttcgtgggcgtctcgccatcatccctcaagacccggccatgttcgaaggcactttgcgtgacaacttggaccctcgcaatgcccacgatgacaccgaactttggagtgttataggtcggtttaacatattctattcaatttaccgccagcaactaactggtttgcaataaatagatcacgcgagactaaaggaccatgtctcgaaaatggacggacaactggatgctcagattcaggaaggaggtaagtgactgcctgcatctagacattgcctagggcatcccgttccctaacacatttctcaggctccaacttgagtcaaggccagcgccagctagtatctctcgcccgtgctcttctgactcctagtaatattcttgttctggacgaggcaaccgtaagctaatcctgcctttgcttttgaatgacagattcagctaaccatagcgataggctgcagttgatgtggagacggatgcgctgctgcagcgcaccctgcgcagtagcatcttctctgaccggactatcatcacgatcgcgcaccgcatcaacacgatcattgactcagatcggatcatcgttctcgataaggggcgtgtggctgaatttgacacgcctgcagagctaatcaagaagggcggcaaattcttcgagctagccaaggaggccggcctgctcgacagcgatggtggcattgcctactcgcaatagcgtatactgcaatcgcctgcagtggcctcgaatccccgcgtttcctgttctggcgaaaacatctctcagctagccagcccatctgagaacattgaaccagccccatccatgcagctctgattggggaggctggatttattttttggcacctcgggccgatcttgggaggtcccggatgctctctcgctttcttcttgcaggggtcacgttgccaacagatcgttgctgaccgttcaaagagtaggtggtcctgaatgtggcgcaggtgaccgtgcatatatgcatgtacatggtactgaagaaaaaattttcattgcacagttcaagggacccccctgaaagggatggacagacatgaaaaacgttggagagtggctcaatggtgcaatctgccgcgaattttttttttctatgctgtcctcgagtctattgttgtttcatgttgggatggtgtttgcctcgctggtgggtgggtgggtgatcgaggacatccgattggatttgaccctgcgaactaaacgataaaaagtgattccctttactccgtacattagctttcttgtttgccttgacatcttttgatcaaattgtggccgtgcacagcgtgttgatatctactgaaatagcctgaattcctacagcgggcattgcctagacccaagcagcaactgaaacgtaactatgcattaaacttaattaacacacagctttccttgactagggcatcgtctgcgatggttatctgcagtagcgtctcgtactaaacgtggcggtgtcatcttgatatcccatcagaagagcgagttattgtagcggtgaacggtcagccacctggctgtctatcaagggtgtctgttcgcaggcccttggggtcagcaatataacagaatgtcagctctacttatctattagtgatactatttagcgaagaggacatgaagtcaagattgtcgaatatcgacgcacccagaccctcctccgccacatgagccccccttctctctggttcgacggtcacatcctgagaatatatctccggggcaaaaatagacatgccttttttttttagatagctacgtatacgaggtgtacctccttgctgcctgcaaaacagactctccacgcggtcgttggaattgtagtactccgtgtatatgcatgtaaactgtacagataatgaggtgggttatttgcctcggtggaattccttgaaacatccgagatagctttcaaaatatatctgccgacagaaaagagaactaagtttgcccttgagaggggcaaagggaggggcaatgacagcagtctccattttgatttgcatgtcaaatgtttaatgggctttcaagtgctccgtatgttgtaatgattgacaatttcgaaacacaagggatatcacagtatatctcgcgtggagaatgaacgatcgcatggcattatcgactacctcctaccgaatctaattggatgcggacctgcgttcgtgatatgtttcagctattcagatcccaggcaagggatgtgtaagatgacctcaaaaaacccgctgcatgactgatctctctgtgagttccgggggacggcggcactgcttccttaatcttgtttaatgggccatgtcatgatgagccaaccagagcgagacaaatcgagatctccagatcgcgaactactacccaggttgtgcacgtcgacgaaagaagtaatggtccttgtaaaagtagatcgatctcgcacggacaacgcaaagatcaggttttccggatagctccagccggggaagagttgtgctttcctagcggatatggatagaatttgttttgctgctatttttgctgaatttttgtgctctacgccgtatgcactgttatggactcatggcatgcattcgtccgcttcttcctcttttggcccccagcccgaagcctccactcgaaaatggcaacagccattccccgaacgagacccgatgtcaggatccccgcttctcagcaggtcgatcgtacatagctatgtacacgtacggtgctgtgcatcagtggcgagtgggaagctgattgtgcgacaccagcctgcgagagctgagcccgtttctgtatggaggactggctgtcttgagcactatccactatgcacactaccggcgcaccagcggctccagctttacacatatgatggcaggaacctgaaagttggaagtctctttccggaaggtaacgaaccaaggcgttatcggtctgcggagatactccatcttcccctctccaggccagatctgacgtgacatatcgaaaggatattaattttcgtggttaattcatacttatttcaaaaaaggcccaacggcttgaactgcatattattggttgtacaataatatatcaaacgtctggtattgagacagaatcggggaactggaacgcctgcaagcctccgatcgactcagccctgaggggaagagcgggaacccacagacacaacacaccgcgaaaatctcatgcacgatgcacaatgcaccgatttcagtcctagactaccaatgtggcgggattaggggttcagttctcccggaggcaaagacccgcctcgggccacaacaggaagtggaattagggccatgatcaccgagggaaataccagagacagattcgaaggtttggattagaaaaagtcttttcgggggttcgtcttaattagctctatacaacacagatggggaacggaacataatgtggatagttccttgcgtcgaacagttcgaaaatgagctaatctaatggagccggtgggaatcaaagtggcaccttcatgctcgtaatggcctttcctgttggagagctacataatcagacagaacgcaggaaggcctgcattcagtagtccgtactccgtagtaataatggcatgcacctgaattatggggcgaatggagggtttcaaggtatttgtcattcccaggccccacaagaacgctttctcttccccagccacaaactcgcgtggaagccgggccttcccgggggggaaagccctatgggtgggattgaacgggcgaaagggatcttgctagttgatccatcgtgcctttcagtttcttcaccgcatcagatctccgccgaatatagtagatgatcaaagtctatacactggcatccgtttccagcctcaccactcgatcggaacacagatctccagggacgatcgcgcggatgctgcttcgggcaatttgtccgtctttgcaggcgacggggaccgaaatggtccacttgtgaagtgtttggggtggtggtattggcccgcggatcggagataagcggacactagagactagactggcaggctagcgtgattgctgggaatgagatatatcttgtcgattgggaaagatttggattggtaaacgcgatcgcgagtgttaggtttctgtggtggattcgtcttggagatttggggtcgagagtggcccggggaagattttacagttccttagctgagtttacactatcaacgcaaatgaactgcggagtagccagtgccagtgcacgggaagaattgtgcaatgattggctgtgggtgaaagttgagcgaaagtatgatgcaaggacctcttaaggcttaaaaagattccgatggattggacatataagccacgtctccattcactcatccaggtacttgggactctccaagatctccagccttcgaaggttggagtggttgactgagtcattgggtgtaccccacttggcgctgttgagttttgtggctttgtggtaacttcctgctgaaccacggaactggatgagtttatcagagttcaatccagagcttcatccagagttccaatctagatatggttcgaactatggaagcgtcgacatttgatagaatagttcgggcttttctccccttacatatgtcccatactctattctatgcgggtgatttccacgttcccccactgaggcgatgaggcggccggagtaattttccgcagcaagggtgcctcctgactatcccagggctaagcgagacccggaagtggaccgcgaacgacccattggagaaaattcggccaatctactcagactaactagatataaagtacgaatcacgccgccacctgccaaggtggatgtcgagattgctcgtacatagatagactagaccgaaatgatacagtctcaggggttaaggtaagtcttgcatgtatacggagtaccgaggtccatagtcggaaatttactctattcgcaacacaatgagtgaccaacaataaattgactgcagtagcgttgccccgactcgtaggaacaccatgggcggcccttcgggccgtgccacaatggagagatgattcgctgctgtttcacattgcttttgtttcttcccattgtctatccacatctctattgcaaacagtagagacagaaatattgcatatccatttggaatgcattaagttatcgaaagccatgcatagaatgcatattcgtaatgcttttcgacttacaataagataggcgacaaccttccaagctcggaatgaatgctcattgggattggctgccctgaataggaatgatgctatgatcaacaccactatcactagggcacatgagaactggacctcgtttacgaatccagatgtaagcatgactcggaagacctcattcgcatctggacaagccatcgcttcctgaaaccttagcctggcgttatcaaaagtggtaattgaatcaaccgaagcgaggctcgtttctgcaccaattccagcccactggatagagtctgaagggctctatgatcctcaactttgacctttcccttgggatagtggagcaccagctagaccgtatccgaggtttgacagctttagtttgaccggaccgccatccccggcccgccccagtctagtggcttggtggggaccagccggggcgagtctgggcctcagggtcttagcgagattggacatgggaccaaaggggatactccacagtttaggaaagagacatcgtcggacgatgattggccgctgtcaaaagtacaagcgcgaatggcacttccctgctaatcctaaaatggatacgacatcgttgtctggggagtcctttcctacgggtcccggcttcggccacaaaaacgccccgataaagaggggggacgctagatgacgcaatgccagtgcttctcagttcgatcgtgctcgatcgatgcgcataattgatcgatcgtgcgtgcggaggcccggattcgtgcaatagacctgcactagtcatgtgcgattttgctccgtcccgaagatcaaaatagggtgccggtttgataggccctgacgtgcctctaatacgaggatattttagcgaatgcagctatctcttgcccgactaggaaacaccctcctttcacgcgtgcaggttgcctctcaacggtatctttgacatagcacatagcacaccgatcatgcagcctccaaacgatattattgatatcgagcagactcatactctgtatactcccccttttccccctccgatcgcttcggtctatactccgtacgattggatcatcgagatttgaagggaactatacatgaagcagtttttagttgctaaagcatgaaagaaggcgtttaggagttcctttgtatattctgtttgtatatctgtactacactcatggcggtgaaataacctaaagacacaccctagtccctgtaatcagcccgggagtttctctagcgttccagaaatgtgcgacggacacatacatgaagtcgtttggctagatcgacaatccccaaccccgaccaacccataccaaccccgatcgtgtgatttgttgcagttctccccaatattctgacttggaccccactcagttatttccttcccgtcaatgcacacccgctgtcacaatccgccgagtccgggccaaagtctacgcctcattttgaggtttcagggtaattgcatcaccgaacaactccgctctaactctttttttgtacttcgtagtgtcagcggtaatagcggtcatcttaaaagttggcattgataaaatgtcgttctgaaactagtgtgataaggaattagaaatgccaagctgtcaaacttggtgacgttttgtctggggacaaaactcttacctcgattaaggtccagggaacatccatgaaggcttctttcctgtttagtcactgccaaacagtgcaaacattttgcctcccagtttccaccgtggacctgccatgtccctgtggcagtgcccaaaataggcgagccacgttgtgtggctggtctgagcttcggctaaggtaaattgtagggatcaccagttacgcgacccaatgagaagctttcgtttagaagtgtcaaatctttgatgatcactgacataattgtttaaagaaaaggggggtgcatctggaatctagacctccaagacattgaaattgaatattgcaattcggagtttcgaggtagtccgtagtccgtacatacggagaacccgtgatttgaaatgcgactagggctttattatttatttatttttttactatcctttagagggtgttgtagtgattcgcacgctcaaaagaccacggctaaacgccttgctaggaacagggaatgggcggcacaaacaaagagatatactatccggggatgttatcgctgaagccgcaggtttttcagatactggatcgagtatgggagtatgcctagttttacgtctttgcgccctcaaagaatgacaaataacgtatagagtaactactccgtgatcaccgtttttctagaactgtttagttcaacgatattgctttgttctatgcctcgcggtaacttaaaaaagatgggtttccgaaggcactgcggctctattgctgtacgtactacggagtagacggcacggcaattgaatgccatgtatgtacggagtttcaatgagatcgatcagatcgatacaatcttcatacgcaatcagattggagttgtttgtgctagaaaaattctgcctcttgcatcttccccgataaaggaccgaggaagtatgtgttccccttttgccatgtcaaaacagatatagtgttttagattctcccttttttaagtagccctgatcgaggtgggtatccatcttctttgtctgtagtttcaagacctacagtgcaagttgtagcgttatcccaagaaacgccagtgtaatccaccgggacgggagatggacgcgttgacagaatcctgggttaccgagtttccccttcccctggactcttagcacggacccgggcggagagccaggaggtctgctgattggtctgtcacaaaatgggtcggacgtcaaaaataccgccactaacccgccatgggatagttcgtcgaactattttgcaaccagttttcttccccgggggaaagaaagagtagatcacgccgtggtgttgggatttcaaacactacattatctcgatctgttctaggtcggattttgaatttattatagcttatcctcgcggataaaacggcgtaggcgagctacggtccgtattaccaccgtactttttgatttcccctttccctccgattgaaatgacggatttggtcaagattgatttagatcgatttggcgagatttgaggtctgatctcagggggcttttaagctatggattttaggtgctatactcagctgaagccaaggtctctgattccagaaacccactgtgtttggcttgccaccccggagtacggagtaggtatctgtcaatgaacggagatcgacagcagcaacaagctccagacggcaatgaaaagggaacagtgacatattatcggcgagtcatctcccaggatccaggatgatgggccatgcacaagccggatcttgataggttcaccaagaatggggaaagtgtggattcgttcacatggttggctgctagtgtcggggcactttggtgctgagatccgacgatcgagaaacacaaaaagaaaatgttatagataaatcccagtcacaagcaatgagtaataagtaatataatgtaatatggcggaataatataggcatcattatacacttttggtcctctatcaacatcgatgacaaattacttatcgaaccggagcctccgaaaggtctgtaatctgcacattaagaatagcacccacacggcgtcaaatagggcctgtgcgtctccccaacgggggcatttgggtgtgcctgacagctagacgcgagtgcttagggctaattgtgtcgtgttcgctatgatggacatatctgcgttgctaaggtctaggccaacggttgcctcgtatgccaatcgtaactgactgcgcgatctgatcccctcggttttgagtcttccaactgacagcaagccatgagcctgggttgtggggggttggtcgatcgataatgagcgccactcttggggtttgtcccgactggaatttaatggaatttcctccgtaatggaattaatatgagtttaaataatataatataatattcaaatatatataaaaaaaatataattctttataaattaaatcaaattaatatgcgatctacaaatagtgggacagggatcctggatcgggtccccaagtctaagctactgcaagtcctttgaatgcgccaatctgcatacgatcagagacggattcggcctcctaggatcatccatgttgaattgctggtcgattttggatcgtccttttgtcatatagtctagaactgaaaaaggcttgcatatccccttcttatccttctggatttctatacaccctcagctttatttaaaagatcatcccacttgcgcatcttctttttaagatatttcattctcgactgctccaacccccggtctcacatctctcacatacttgggaacacaaaagtggaggctgcctttcgttcctgcatcccggttacaaacagtcgccgtgctgcagttatccgctttccatccccattgagacgcctgcacattgttacccttgaactgtgtgagtacatcccagcaagttgcttctggctctgtttgccagagcttgattggacgccggtggccagattgccagcgtttgtcctaccggttcccgcgccggagcgaagatggctcttccgccgttgggttgttcatgaacaccctctgccggggacggaatggtgctgccgaagatgcttcgaggcagttggctgactggatctccacagtgctagcctttcttcgcactaaatcgcaaccccgccacccgagcaacaatatctataaagagaacagttctctccggggcaaacccacatcattctccttctctagtatcccgatacactattttgactgagactcaattaccgttctcaagacgatttcgtccagcacctatttctgctactatggtttacaataaaccaacaagcggagccatgaagagatctgcttcggctctcgatggacccccaggatggggagatgttcctgtatgtgttccctcaagagaaacacaggttcattcttactgatatccgtttagtcaatgatgaccaactcccgttcatcattccgtcctccttatactcactttgccatgatctacctcgaccgtgatggcaagctcaatgttgaggaatcaccttctattcaagagcaaaactccactgtgtttaccgcagaggtccgccagaacttcctcgagattctgggtgaacgcatcggctaccatgcccctcgccgtatgtccaagttccagacccgaagaccaaccagtatatgctgataccaatctacagagataatggacgtatctcctcgtcgagtgagacgtcgcaagggcaatgctcctgctctttctgtttgtgacaaccgcctggctgatcaggacactgatagcgaggacatgcctaacgggtctactgaaatggttcccctccgaattggagactctcaaaaggtcatggcctactatgaaggtgccctcaagcacttccagcaactgaactgccgtatggttgccaaggcgttcatcaaatttatcgagcctcgcaagcaggtccgacacccttataatggtggcaaggccccgccaggatctgcccccggtactaccggtgacccagaaaagaccaagcccgagtggtggcctcccggtgttatgcacaaggagcctgatcacctgagaaaagagtgtatgatttgcccatggtcttgattcttgatctactgactaactgagctttaatagaccgcattgagctcttgcttcacattatccgcaagctcggttctttcggtatcactgccgataagcttaaggatgttgctggcgacaccaagcgaagcttgaagcacgcatctcatgtcgagatcatctacgagatcctccgggtccgcaagatggaggagcgtttcgaacgaggtgaagtcgacgccagcatggtcgtctacaccatgaaccgcggccccagccctaagagtgatgaagaagacgattccccctcagtgaccattgaggagcctgagcacctcaaccagggattcatgacccccatctcatcattcgagcacacatctacctccttagccacacccatcgacaacatgccatcggcccgctccctcccaggcagcttctccatggcggagcctctcaccttcgaaaaccccgcccgccaggaccgcccctactacgccacaccttcccaatacagcgattcatactcgcagcccatgatgagcacccccgtaacatcggagatgatcagcccccacgacgtctcagtctcggctttcgactactctcacaacacctaccagaactccacgcctgatcagtcacgcgggggaatgagcggacactacgatacctgggccccatctttccgccagaacatcttcagccctgtcgactacactacaccagcgactagccagggcatggcccagccttcaatgtcctaccagatgcccatagtatcgcaaatgcatgacatgtcccatcaccatgcccagcaggcccacatggactccatgcaccaaagatccctgcctttccgcacgggatcgctgggccacccacaccccaacgggatgactctctcccacactgtctaagtggaacgggcgactggaggatggcgattaaatgggacatgggtacaggtatggatatggatatgggtatgggtatgggtattaacgaacgtgaatgagtgatggcactggccaacaaacttggcgctcatcttaaggccttgccaggggagttgttgtctttctttggggtttattggataaaaaaacttggtgtcctcttgacaggtgcaggtacaaatgggttctgtttgcttcttcgttttggaaatatttgggtcttgtgatttgaagtgattgatattccggtctttgtttttatctttcttcttttggtctcgcctttttttctcacctttttttttctttcttggtgttagcctcatgctttttttcccttggtcttctgttgagctttttatctgctttgtttggtttttatgggttttcttcaacgtggatggttggagctgttgatacacagatttgggtagatacttcaaaattttattcgttggtaatatgcaactgagctcctctatttcttttcacgatcttttcattagataccagtattcaactatgttgtacctatatagttgatttcctctgccacttcttggcgtgctctttccgtattagtgctccttattattatgttagccaaatgactcctctctgagttcctcattctctgttcctgacagtctaaggcggacacgttgctgcttcacctgactgtctgttgggcgcgaacttgaggctagcagtgaaagaccactaactgagtaaattgctgatgttcgtgctgccatcttgcgataatgaaccgcctgtctctcctagatcccgtatgagcttttcaattgtttctgccctcccactggcatgcaatatgtttccaattgctgcatataactgcaaatgagccggtccagggagatcaacacgcgggcagtgatttgtcaatgataccagcctgtcctttggcaatgcaagttcgcagacagatgagaagcgcgggaaagtttcgatgtggtattgatgaggggtcgaagtggcctcaagaacaaagtggaagcggcggaactcaccatggaaggtatcgaccatcatcataatattatccgcacgattaacagcttcggatgtcatgtcaaatgtagaccggagactcggaaaatagcgaaagatttgtgtccatatctcagagattcggcgctgttcatcatcagtgtcaaagctcccaagagcaaaagggataatgtggacagcctgtaaggttccttttggttggccggggggaaaattgtggtcagagctccaatgcttggtgatggtgcattgatagccgtctctcttcaaacagtcccggcggaggcatacttgttcatttcgagtcgctgatgtgatgtcgcgagagtggaggtcttcgaccgaatcttcaaaagcgaggcggggggatggggtgatggcgggggtcttcccgccctgggatagcaacggccgcaacaggcctgtatcgatgctgttggcaagctgccggatttcgtcgttgtcgttgcagtgccgacgttgatgcggtcctagatatgagataccgtggcaggggaagaggtcgtcgcacgcaatacttagtacgatggtccgggcttggaaacgaacacctggaatggttagatgaggataacctcgtcggagcagaggagaaagtcctggagtacctccaagacgtcctgcgtcatgcgcaggattctatcaattaaccataacctagaaagggtctctttatattcatatttacttattgcactacccctctatcgaccgctagtaccctgttcgtttactctttcatcatctcatttccgtttctactactttgttagtatccactaccttacttatctctcagttccttaactatttcaatcctcctgtgcctctcagttttcttcctcctatatctcttagctcgctatttaatatactacttattatcctacccttaccttactaatatacctatccggagatctgtaggtcgtaggcgttgtccttaagccttatagggacgcgcttatacccattatagtatagctagcgacctaaatgagaatactatagcagctgactataccgatactaataatgaccctctgcctactactaagtacaattccggcttacttatagataatatcgcggataatagtgacctaggcttacttagggaggctcttatcctacctaagagcggatggactatagataatctaaggccgaagctacctcctatactaagaactaacgttatacggtataccttctataccgagcgaaccttcgcgctcgcgctctactatttctataataagtctaccctatacgcactgcgttaggataaggcgaagatattatacctaatcgatagctaacgtaacagtaagatacctagcccttcgtcaggcaggaaaatcgatatacccaccgttacaatatggttcgttttctacttttcaattcataactactgggacaaccttaagtataaagcctgtcttgccttatcttacgtttaactgacggataagggcgtcttctactacctatacacgataataccgtaccagagaagttcccggttttaggcagactttgaccaatatagggatattcgtacctcgcgtgttcctctggaccccccgatgatcgtgtgggccaatggattgccctggttcccagtctacaaagcgttttacgtcctctgtgggagctggagccctgtatcgtacctcgtgggaaggaagtaccgctccaaaaccactgagttttacatcggtacagcactggccccgcctaccgctgtcttggccggtcttgaagattctctgccgcaattaaccctccgagcatttgattcagcgacatacccagatcctaaggacacaaatggccccctcgacctcgttcatgtcgccaccatcagccgtagccaaaacaagaccccctgcccgtccactcgctggcctaatagggagacctctggaaaggcgacgtacgcctttttgggttctaaagcgaccccgtgcttttcgagcacgtccaggacaagggtcaagtgttcgacatgttcgtcgaaggtatcagatgctgtgacgagatcgtcgaggtacgcacggcagaactcgacgaactctttcaggagtaggtccatttgcctctgaacgtagggcacactgttgcagaaccccatgatcgcgacatgaaacttttcctggccccgatgcgagacgacacatatccgaccgcgatgttcgcgtcggacgcgccattgatagaaaaacttagatgcgtccaagacagtgatgaacttcttgccctgtgtcagaagcaaaatatcatccatggtcggaataggataaatatcgcgcacgacctctttgtttagcggccgaaggtccaccacggcgcgacccttacgctcgggctcgcgcccgggccggtgagtagtacgccatacaacaaagacggggaaacccgtagcagtatgtcccgttgtataactcatcttcccttggtcatgcaacggttgaaaggcagcgtcaataacctcgcgatccttaggaccaactgggtaaatcttagactttggaagccgtgcctcccagccaggtttgaggggaatcctgcccctcgagggggaagtaggtaaaacagatctcaaggaaccttttcgtgtcgtcggtatgatcgtcgggatctgacgactcgtaacttgaaagcgcgacatcgagggataatttggcctcggcaaaggtggagaatccagttgatgaaacagcagggctgagagtctcatctgactgcgacattgcaaacaagaggctggaaaggtaaaaggaaacgagtggtacagcggttcataacattcaacctgccgtaaccctttctgccgcctgcgtcacctagttagagttatcaaaagttacttcacaaaataaacagaattatagggccgagtgctctctttgaatagactaagcgtaaactgagtgcacaatagataccttcgacaaatctctaagtaaataagcatactcaccgagtcacgtgattattgcggagcgaagcgtagcaattaaatcataacctcgtgtgcatgtcacgtgaacgttcttttcttgtttcaatgcggtgaagaagtcatcggctaactttggcagaataatccaaccggcagaataaatatagactaggcctaatctggctagacgataatttctattacgtgctgtaggttacttactagagcagttactagagcagttgctcaagcggtcattaagcgattgcttaagtggttagttacttaaacagttacttgaacgtttacttaagcggttgctcaagcggtttctcgagcggtttctcgagcggtttctcaagcggttgcttaagcagttgctaaagtaattgacgataaagcagtttgattaagtagttaataatgatatgataaacgggacttaattttattagtagtttacatataaattgaaagtacctgctatcttaaaagttactactaccatagcaggaaatatgcctaattgtgaaggcggtactgaaattacaggcatggcagagaataagctagtaagagggggctttgcgtagcattagaagttggaataagtcgcttcgctctgcaacgactatcaagatgggcaagccccatacgtagagaaacctgacctggtcgaggttttacctataagtgtcggtcttgtacttattggactataggactcttttttagtttcatatattagattctgtttcttacttcctttccaaaactgttttgtatctattaaattatcattttttcctccgtacttgtcttcgagttcgaatccctcctgacgctccatatgttgcacaatatctgccctcggtggatatattgatatctgctgatatactaatatcatcttgtcaatatacctattgttacttcagtctaattggtcctggaataaagacttcagccgcggccaattcgacgcgccagccgagaccagcgcttggtcagcggagtaagcggagccactccgctcagcttgaagctccgcgaccagggaaacttgcatttccatcctcttcaatcgctttgtgctcagtacgtgcttgacttccgctctttattctcatgcaggtctcattttgtggctgattaactggtgtcgcctttctagttcacgccacgagcgcaaactccgacgcgcacgcttcacgagcttgaacacctaattaatcgcaaataccgaaggcgacagccctgaggtcccttgcacatcctgccgaagggaaaagactcgtgagtttactgacaggtagcgcgaatacctatccccgagtctcttcaagtctccttgcggctttgtaacatgggctgacttctttgttgtcgcctcggcgcactaattccagcgaacagcaaacttttcagatcttcgcgcaatcgactttgcatctatttcatctcggaattattgacccccaaaacccgaaatcgacttgaccatagagcgagcggtggggctgtttcaagaggtggcggcctatccagttgaatccgctctttgcgggcaggatggctagcccgttcaatccgtctgcaggccgtggcaggggaggcgcgccgggcgtgccaggctcaacgggacggggaagaggtggacatacggtgacatatgtaccgagaggttcaagtgcgcctcgcgcaacgagggctcgagggcgtggacgagggtcggtgacatggacagcgcgtggccgtggtcgcggcgcaggcgctgtgaaccacaccgcaaatggatcccagcaacctgcagagggcctcaaccctagtgttgtcagctcaccgtttgcgcaatcaaatcagcaaaaatccgtcgcatcgccgttcggcgctcagcctgcacagcagtctccgttttctagagtctcaaacagtgcttcggcttcgaacgtcgccaagaacccattcgcccaacctatgaacactacgaaacaacaatcatcgaaatttgttggcgggggatctaatgttgccgcggccgtggagcatgcgtcgacgttgaacaattaccaggaacgctttgacaaagtcagtctgcccttcctcgaaaccggacgacacgaccacggagctaacccaatctgcagctgaaaatcgatcaagtaagacagcgtgaacgagcgatcaaggatgggcaaatggcggacccgaatcagccgacttctttaaaccaggctatcacacccgtgggtacctgtaccggcatgtgccctgatttcgagagggtggagcggatcgtgcagaaagcagtggacaagtgtgaaaaggtaatggtgcgctgatctctgtctttggcgccacactgacgcgactttagtatcataatccgtcaacggaccagctggaaatcatggaaaccaagatggtgaaacgcttccgacgtgcggcagctggaaatgacgagcaattgccctcggatatccgaacaccaaagacacttttgcaaactatgaactatctcatccgttatgtgatcaatggtggtgaaccgttggctgtcgtccacatgtttgtctggaaccggacacgatcaatccgaaacgacttctcagtgcagcaacttacacatgaagaagatgtgaagatggcggtcatttgtctagaaaggattgcccgattccatatcgtgtccctgcatcttctttctagtccagcgaacacagagcagttcgaccgtcaccaggagcgtgagcagctcaacaacaccatgctctctctcatgtactactacgatgacaaccgcggacgcattcacttccccaacgaggacgagttccgcgcctaccacatcttgttctcgatccatgaccagcggcctgacctggaagcccgtgttcagagatggccaactgccctactcgcttcacctcgagtgcaggtggcattggaactatttgccgctgcatgtaatacatgggagcctcaaggtgccctggattctcgccgaccgaacgcaattgctcagggattctacactcgcttcttcaacatcatcaattccccgagtgtgtcatatctgatggcatgtgtggctgaggtgtacttcaaccacattcgtcagacagcaatccgtgcaatctggaaagcttactgccggactccgctatcacagcaatccaaaaacgataattggactgtggaggaattaaccaaggtgatgcactttgatgacgaccagcagacaattgaatattgcaatgcccagggcttgcagttcgtggagaatgcgagtggtggactgtatctctattggggtgatcgaccagttgactctgtcggtaagtggtcttaaactccatctcgaatctcgtctctcatttcccacctcaccctctccgtcgcgcctgtttatgatagcttccatcgtatttcttcctctatctttctttcgtgactaacaatctcccagactttgcaccttcaaccgaccactctttctctgaaacatacgtggagtccaagcgcgcaggacgtactcttgttgcggttatactcggcatgaacatcagagaagccgcaagaatgggtatgattgatcgttcccagttgcctcataagagtgaaaccttgcccgaggctgaggcagaagatggggatctcttcgtgagtgatattgacaatcagacacccgcacctgtggttgaaacacacaacaccattcaagacacatctgcttctgaattccggatcgcttctgagtctcagaaatgtctacaatctactcctgcaagttcgccttcactgttccagtcaaatctaccacccgccgcttcaaagtcgccaaatcctttcggcatctttcagccatcaaaaacagcatctcctccctcgaatccattcgcaacctcgatcccctccaccaccgttacaccctcagcgccgtctcctttcgcttcttcgccaaatccattctcgttcccgaaacccgagaagaccgacgcctcttccctgaccactaatgtggcaccctcgccctttcagacaaaaccccctcctcagaccgactccgccgataagccagctgtttcgtcgattggctctgccggaccctcaccgtcacctttcgcctctactccttcttcttcgtccatattctcaaagccagcgtacgcaaagcccaagacagagacagctacaacaactccacccgtgcctgaatttccaaagcccattttcttccctccggcatcgtcgactgcagacaaacccgcctccgtgttccagaatggctccggttctgtactaccccctggcccgaatcctttcgctgcgccgtctccattctccttctccgagccatcagaatcaacccaaaagacagaggctcctgcaactattcctgcgcagtctacgttcaagcccagcactttgcctcaagagccgtcgactggggacaaacccgcctccatattctcttctggcgccagcgctttcactgcgtcgtccccattctccatccccaagccatcagagccaagtcagaagacggagacaccggcggcagttactaccgcaccctctacgttattcaagcccataagctcgcctcctgcgtcgttaactgaacctaagaaccccttcgcgtcctcgatattctctggtgccaattcctttggtcccacaaacacccctgctgctccatcgctattccaaggcatcaaaccccaagagacagctgtcaaaaccaaggaacctgcaactgcgcccaatttcgggcagcccttctcgccattctcggtgaacaatgctagtacgatttcagggtccccgaacgcggctgcaaaccaatttccagtccctggctcaatctttgcggctctgaaggcaacacagccaagccagaaagcggatatcccagctactgcgcccacaccagagaaccagccatcagggttttccccgtctttgggtagtttacagtcgcccaagccgagtgagacttcggtgttcagtcactccgcacctgcgccggcccaagtacctggcgcacatcctatcaacggccatgcttcgatttcgggttctcgtcggtctgtctcgcaaactcaggcgaccgcctattcacctccccagactctttttgaagcacttcgacagcctaaaatatttgacaccacatcgaatatatactcgtctgaaacggcgactactcagccaacacctttgttccaaacctcagagcactcagtggtgccaggacagcaagggtcactgaaacgacagcatgaggccagcaatgcaaatgtgtcccctcagcacaagaggcgctcctcgctgaagaaaaaatcccccgaggcagcgtctgatggatcattcagacggtcggtgcatttcgaagaggcacacgaaaatgaacctctggcgccggaatcgcaagggcgcaagaagtctaaagtcctccaaaagaagcgagtgctggatgagcagattgagccccagccggaggaacagggtccgagtactaaggtgtccaaggtttctccagaggaagagcatgtccctttcaatttctcggtctacaaagcagaaaaccgccccatgccgaagcttccgatactggaaaagctagaagaaaaacttgcacgagccaaggcgttgtgcgagccaaggcgtcttaccgaagaacaaatccagtacatagaggaagctcgactgaaacgggctcgccaggtcgacgaggacgagattgcgctctcccgggcacgaattttggccgagaagttaaggaccggccctggaatcttcgatggttggactggaaacatccgagagccatggcacgatccaaactggaaccccatttcccgaatcgtggaaaagtatcaagcccgcaatattccccagccaacttcctatgtacccccgcgtctgacactcaatcgctccgccagaggatacgaggtcgcctacgcacctgataccccggaccgacctatgtccagaaccgaacagcgtatccggcgcactggtgcccgtgggcttgcacatgtgcccctggatttcgaacgccacaggcgagagaaagaggagatggctaagagcaagaacggaaagaaggagaatacggataaagacaaggatgaggaagagaaataggggtctccctagggtgtttaaggggatgcactacgctttcctcattcctcatgctgtaattatctcatggtgtatcttgcactgatttattctgttctcatatgggccgtggatctaagtgcccgcctactctctctcatctcacatttgcattttgcggagtctttataatgatatctttttcctcaatagacattcacagcgagaatttattcatctcttccaattactttctactttctttttctgtttatttacagcctggtttataacaggggcgttcagttacgacggtaacaccatgtatagatctgctatactataacggtagttttgttgaactacaccgtgatactacatatacatctctagacatacccaccgaccccatttagctagtaaaactacacacaacagtacaagtggctaggaattgctccgggggacaatttttgtatgaggctggtacgtgcacgacaaaaacaccatacaaagtgggccactttgtagagaccccgagtgacttttggggaggtcaatccaagttgactgtgtagtagatataaggatagaaaatgatatactgcacgaccatacaatcggcaccttccaaagccggaaccttggacgatagacaatgcacaagacataatgcggcatgtgactagactagccagccaatccttaaccgctacttgcgacgcgagcctgggatccaaaacaagccatattcgctcgaagttcggacaacacgcgatatgaaccagtgtcaaaaaatgacgcggaatcttcttaacattctcacacgtcccttcaaggcgtttcgccagtcgccctgggcattatcgtccgcccttccatcccgaatcgacgcgtccttgctggttgaagaggagacttccccctacgaaccacctatttttatccggcgcggatcggtgaaatacttaatgaccggtatcaaattgcgaccaagcttggccacagaagtagatcgagtttatggcttataagggaccttcactagttcgtattagcctaatcatattttaaggtatttattgacagtttaggtggtactggtcgaataagcgatatctagctcttaaaattaactctaatgattcctatataaggaaaactgctaataacgttaagctagaggttctgtagcttataatgagagcgaaccgttaatataagggctggcgtttcgttcgaaaattacttgactctttttctgtccagggaatctcagggagtcatgtatgtctcgtcttcgagcctttacgtgagtcactgggaaaatattgccaacgatggcaagatggtgtgatgccaccggagatttttaaaataatactccaagaaatactccaagcgcttgattatctccacactgaatgtcatatcattcataccggtaagaattctgatttgtgttagttaacaatatggttcttattcagaaacagacttaaagctagataatatcatagtacgactagaagattgtgagctcttatcccaggatgcttaagatgagtttaaaaacccactacctcagaagcattgtaacgatagatatatcaacgatagacatatcatctatctatcctataaggactatgaaccgctgaagaaaatcatcagactgattgaagtcgtcgactttgatctagcagtctaaggtgatattcttcaagatggctgtatccaggcggaggtatatcgtgcgccagaggtcatttttgacagagggtatacgtatagtgctgatatatggagcctgggagttatggtaaacagtattcccctaatactagcgcagataactaaccattgaatgaagctatgggattttctagaaggacgaacactgtttgaatcagttgatccacacatcgttgaagactatgatgacgcaacgcatcttgcgtatataacgtcgcttttgggtcctgcccctaaagactttgttcgccgcggcaagaggacatcgatattctatacggctgctggtaagtaagtctttcgattaaattgtgtaaactaacactgcattttaggaacactcaaaagagaagaccttgtgcctagtaactttagctttgaaagcagcatctccaagtttaatggggaagaaaagaggatgtatattaagttcgtcaaccggatgatcaaatggaaccccgaagagcgaagtacggcgaaggagctactgcaggatccatggcttcacaatgattatccgcaaatataggcggagtatgcgggactgtggagtacttctctgggccattctttgacaacaacggtattactaggtttcctatttcgaacgcattattctcagaccaatgaaacatcttaggccgcttcctccttgaggaccagatccccgaccgcaaactagacgacacagcttcttttcttgaggaagaggagagggaagcatttctggatttcgtcaagggaatgcttgtttggcatcatgatgcgagaaaaatggcaggcgaactggccgggcatccttttcttcaactaaggtaaacaagagcctgatttctgcgagcgtttgctagcggaacgacttgacttgatggttgatcccagttcggcgatgccatcagatgactggttgaagcgttatgatatcgatcttgatcttaggcaactaggtgtcaccactgagtgttctacgggcgactcaccgcatatgtatgcccaggtggatgacaacattacatttgaacccttcagctattcatccatgccgactctcaaaagtgaattgaatgtttacttggaaatggtatatacactgagaaactcctcttttatagactgagcaacatcacgacgtacaagcaccgctatagcagtttgacccagaacagtagtcactggtacttccacaataaccagacgcggaacagcacgtcccaaactgggtaccagtgcaggtcttgtttccggcaaaattcgggccacattctccatttgtggacgggccgccattatcagtgtcacaactgccagaatagcagttccctgcaccacaataggtggtaccattgccgcagtagccctgtgtctattatcagcgactgcagtgaataggaaggatggtcatgaatggatactgcatcacttacgtatatactacagcagtttccgaacttgggaatacaagtcgtgcccccataatcaggtccacaggtgccgtcttgcgtcgcggtgccgttgcctgtgctgatacagtaatctgacccggttccgcagtagccaaatggcgagcagcagtcgccaaaggcacttccaacacaggtaacccccgcagggcacgtaccgtccgttgagactgtctcaggggtgacaggggcgacgcatatgtcgtaattaagccacaggttgccgcaggtggagttaaggtacgggttatactcttgcaactggctaaagttcagaccgaagcgcaggtcgatggtagaacagtcgtcaccggctacaacgagatagtagttaccgcactcgctgatggttccactttgggtcgggtaagccgcagtggctgctgtgtagtaagtaggctcgccggtcgcaccaggcgccgtgatggtcgcgttgggtttaggaaacgttcctccaggagcacttttttctcgccgagtctggttagcatcactcaatgccgcaaatgcctctattgtgtccttcttgatcttagacttaccttttacatacacgctgtcctgctgcaatccctgaacaactgccctggatattagtattccagctaagcaattgagcagtggtcacggtgtaagtcgagttggaatatctcgtggcaaggccgtcactattttcagaggacttagcacagattatggtctcgtggcttcaggcaaccattatgccctacataccaacttggtgtatcccaaaccgtatcgatctcgcatggacgggggaaacaggtagcctcgtcgaaatagcaagcgtaatccccagtggcaactctagcgtcacctgttgatatattgtacctaattgccgcatgcagcgcattagaaatcagccagcccaccaactattgggggaatgccatccatacgtatcgcaaagatcattgcaggtgagccagttttgcagcggctgcaccatttgacccagacaagtcggtgtagttgttgcggaggaacctgtcgtcgttacgctggtggtggtagtagccgttgccgtccctacgtataaggtggaggctgaagtgctgtaaggcagcgttgttgagcaatttgtttgaacaaggttgaactgatcgactaaataatccgtgaaattggtaactggtagccaaggattcaggagacgttgccgatacagattcaagaaacactcattgcagaactacgcccagttagtagacaacctcgatggcactgatgtacttcatagggagttcacataccaatttctcttcatatatattagttagagcggacatgtcatcactgatatcaccgacgtcaaaatccggatcggcacattcaggcgcgactgtgctgttgtcatcaccatcggcgaagcacattgttggatcccaacggatatagtcacttccttgccatgtctgagagaccaggaaacaccaatttgatgaactgtccttcatgcatacaagatcggaattataggtaaatgtcagtggtagcgctctcgccttgaccacgacattgccctggattgtggtctcttctgcacagactgttgcaacattatccttccagaaactaagggacgagacacagtctgtcgtgcagaggttctctacctcagcagtcgtccagactttatttattagcttcgcttcttcgttggcagacaacaacatgtttggacataacaagcttacagtggatgtctgccccgtgtcctaataggctaatagcggtttcattgcaagagacggtggtgttcctggtgaggtgttaaagggataagacatttcagggagacggaaccagaggcaagtactcacagtgctgcaagacacgtactgctcagagagagcccagcaatcaaggcgtctgcatcatagtttttgtacagcgcaaaatcggccgcagcccaagttgtccatgccgtaagcaggacaaaacagagtctcaagaaggagaataacattttgtccattgggtaggcaaggagctatgataatcgaattgctcttgcacgaggatggattggacggcatgaggaacaggaatgtccgggcacttttctctcttcctctccacacgaagggctgcttggagtgcccctcctcgatgaagacgctatcatttatcccgccggtttccccctgcatgatacaggtactaggatatttcgggcaattcggaagctcgtaccttgtgactgaggacttggtttgcttcctgttagcctgcacaaggataccggagattaggtggctgcttactcgggatatctcgtccatttagtcaccggccccggaggccagtctcttgcagccaatggccgaagcgacatgtgaaatcttcccataattgactgctagtacttcgttcaacttgggggccaaaggagatctaagccaatcggaatataaataccttatccagagcacacgtgcggggttcccactcaggaatatatcattaagcgagcacttgagtaaacggtctaaggttacatctgggctgcataagaggtttgaggtaaacaatgtcagattttagttaactttcgcagatgcttgtcatggttttcggttgaaccgagaccgaagttctcccgtacctgcacgagccatcatatcatggagttgattgtgaaagcaattgacaagccgaaagacccagaagtgacgctccaggaccttatttggcctagtactgctcttagtatggctactcctcctccaagcctcaccttccgtcaggtattagtccgctttccacaagcccctctatttccgccccggggccgtcaagagaacggatgagtacgagaacatccctgcattcacggtggtccagatctccgcggattctgcctaatggccatggactttggacttcagcccttggtgcaagcctctgcaggatccttcggggaaatagcttgtttgggcaatttggtggtagtttgaggagtaggataccccctggcgtgcatgcatccaccatcacttcagtaatatggatggaaaataaagggcgctggcgtgtgaccagcttctcgtcttctttgccgtcatttccgcccccctatctgtgccaaaagaaattgtaccctgtcttctccagaggctggaggttgttgtgccgttgctccaaagacttcaacgacaaaggtcagagtggcttttgttcatcagtccctcattgataccatttgcgtgttgagctttggcagcagcttcaatgcgaatccttctgccagcgcttcttgctctcgcaagttgcgggatttcccaaggtcgtcaacaaccccatgggaaacgcaaccacgcgaaaccattgccagagttcactccagtgccccaattgccaaagaactcgtcttcggccctgccgcccctctaccagccctattcaaagaacaaacctaagttcgaaaacgaggcccttatccggcaattgtctcagcatccagggctaagacttgaccatcttgactctggccctggctctatgcgcaaaagagaccttcccgtaggcacttgcgcacctggagtaccttgcacaaatggagcatgttgttcaaacactggcgtttgttcctacgccccctcgagttgcggggctgacgtctgcatttccaactgcgacgcgaaagctccttgtggggaatacgccaaccccgataacgcaacgtgcccgctgaacgtgtgttgttcgcaatatggattttgtaagcctcagattcgcttggaaatttctcatttttgagagcagatgctgacccttattttaccccccaggcggcagcactgatgacttctgtggcactggttgtcaggaggggtttggcggctgtggagcagctccgactccttcttgctctagtggtagcaactctgcggctgcgcggcgcatcgggtactacgagagctgggcgaccgagcggccatgtgatgtttttacagctgaagacctcgagctgacgggtctgacgcacatcaattttgctttctcatacttcgacccatctactttccagatctcgccgatggacggaaatgcggccacactttattcgcgcttcacggcgcttaaggcaaaacagccaggactgcagacgtggctatcagttggcggctggtctttcaatgatgcaacgaatacgccagacacacagaatgctttcagtaacatgatcagctcctcggcaaatcgccaagccttcatcacttccctgcgcaatttcatgcagacatacggctttgacggcgtggacattgactgggaataccctgctgccgacgatcgaggcggtgtcccagccgatttctccaatttcccaaccttcctggctgaattgagggcctcgttcggtagcggattgggaatcagtactacacttccatcttcatactggtatcttcagcattttgacgttctggacatggagcctagcgtcgactggttcaacttcatgagctacgacatccatggcgtctgggactcgagcaacaagttcacggggccttacctccgcccgcacaccaatctcactgaaatcaacgacggcttgtccctgctgtggagggccggagttaacccatccaaggttgtgcttgggctgggctggtatgggcgctcctttacgctcgctgatccgtcttgtaccacgcctaacggcgtatgtcagttcaccaccggcggtactgcgggagagtgcacacggtcatccgggacgctttccaacgccgagatcaaacgtcttctagcggccggaacgggaaccgaatcatatgatgccactgcaggagtccgctggctcacctttgatacgaaccagtgggtaagcttcgacgatggagcgacaatgcagcagaagctggccttcgctaatagcctgtgccttgggggtatcatgattgtaagagaccactttttaccacagtcaccaattgccttccttcgtttcttatttttttctttgccctctctctcactcttaacaccattttcctttctttttttggaaaacatctaatcaaggctttcttccagtggtcgatcgatcaggacaacacagctggcgacagtatgaacgacttgatgggcatcggtacagcaaatggggtgtcagaggcagctgccgcttcattcaaggagcagatggctaatgctacgctgcagaacgctgttgtatcgagctgctactggtcactatgcggaggggcctgtacgaccgggtattttgatgtaactgatgcccgcggccagattgccggcttccagcagaactccgtatgccctccaggcgaagcccagacactatgttgcgccccaggaacctcgatgggcacctgtcaatgggagggtttcaggggcgtgggaatgccttgctcaccggcatgctctgaccccaaggccaccattgtcgcccgtaataccaactcgtacgagatgaacgatggaggtcagcttgaagatctgacttgtactggtggcttccaagcatattgctgcacggaatttgtcccttcgtcgatcaccgattcaggcaacctcttgctctatggccagactcctgtgctcagcaagcgagacggttctaatcagggcctcggtctctatgtaggcgaccacgcggttgaaaagcgttctttacccttgctagtctccgggttgggcgctctctgcctcgctgacttgctcccatcgatcctttcagcaccgttgacttttggcctatctcttgccgcggagggggcaatatgcggtgctacggccgctgccgtcgtcgctactgcggccatcatcggcttttcaattctttacaacctggttgggtggattttcggcggatccccatctaaacccaacgttggcgtcccaacaacagtagcgggccggtcttcgtatggccagtggccgattctcgacttgagcggcggcaccacgacgagtacctgcgattgtgtggtcacatatacgtgccgctatggcatgggttgggatgagatttgtgataaccaaaggtggggggtcgacaagctgctcaacggaaagactgtctatcagccgttgccaacgagccgcgctgccggtgctaaccaaggactatggaaaggccagcgcatagaggcataccgaactgcggcccaattaaagctcccaggcaaaacgtggcgatgtcaagttgatgagtttcctatgggcaacctcgcggaatcaggaaataacgccccgcaggcttgccgtctagtcaacggccctgcgaatgcaaaacagggaaatgattacaagatgtggaagtcggcgcagtggaaaccttgctcgacgtaccgctctgccgtgtgcaacagtagggacagtgggccgcctgcaacctggtatgtaaaaccgaagcttccctcatgcgatcatatctgaccttgaaacagggcgtttggggtgctacccgcgggtcgcggtagtggcagtggaaaacacttcatagatgcttatgatttcgacgagcaaacggccggctcgctttgctgggctacatacacttacaccgagcagcctggaactatcagcacctccacgcctgtcgaccatggtttccgcgttcttgatgatgatccgtatgtttccatctcccaactttactaggtagtcaatgtatagctgacaagacgatgttgataagcatgtacggtaatgcctatgggtggcctcgacagtcctggcgcatcgatccagctccattagcgaacatggcagaccggccgtatgactcccaaccgacgatattccaaagaggccttctcgccaacgacacatggcccgaggagcatagcgactccgctggcgtctgccacgctgacctcagatcacttggcgatgacaaacaggatgtttatctcgacctggattatgataatctcctctttgtcgatctggatggcaaacctgtcgacggtcggacatgcaacatcatctacgaggatgacgacccgcactccgaagtgcgtatcgtacttgatgagaatggtaaggtcgtggaaatatatatgggcgacccagatgctggcttgtggactagggaggcgcttaaaagttccaattcggacaaggtgactattgatcccaccaccgtgactgtcatggcgggtgtcccggcgggcagcgagtcccgacccacgtttcctgcgagtacgactggactccagacgagatcgggaaccgtagtgacaccggcgccgcatgtgtacggtctttgacagcatcaaccatgtcaatgacgaacgaaaccttggaagctatgggggtttataaatatatcatctgatatgacgggcttttggctaggttgggaagatatgaaagaaaatggaaggatcgagactaaatttgtaaataaatcacaatcgtttacgaaaatggctatcctcgtgactggtttcttttgaaattgcacatccctcttcggccctggtacctccatttccgcaggatagagctcggaaatcgtctccggattgaaggcaggatggcactgggatatctaccatgtgggagggatataataatcctcccaacggtccgattcagcatctctgaaagtatcgatagtaccttctaccccttccggcccaatacaccagatgcctttttcaaccagcttgcgccaacaatccaacaaacgctccagccgctgagggcgatagtagtcaccaccaaagggcttgaatccatgctgaaagagctctgaaaagcgtccccgatcaacaaactgcccatcgctttttcgcgcgcctactttcctgctccaatcatcattaaaggtgaacgggagtaacagccgaaatccctcctctgttggttcatcaccgtttctctccactgcctcagtatacaggcctgcagagacgtgagacggtgtgcacgttttggtggacgttgaatagaagtccgacaataaccatggacttgttgttcttgtgagctggataggacgctggtctccggtatcagcgggaaaaagacatactggtggtgcggtatactcagagcggggtaatacactgaatggctgcgctgccacaaatccagccgagtcagctgggggcaggagaaggcccggagcgatatagtagaaccagggccgtctcgcgcgcgtcagaaacgaacgcgcaaaggatggatcgggtaccgaagcggcgtccaggacatttgatgcgaccagtggctctcgattatccgcatcagtcccggaaatggggctgatcagtaatggtgggttcggcagctgcgagatgcgcgcctcaatgacctgacacagtcgatcccactcggcgacacacgtagtaacctgggcttcgctatagggccgccactcccagggcccgattttctcaaagtcaaatagggcaggctctttcttaggcgaagccacaacttttccaagatgaataaggtcgatccagtgggagagcagtgtctctagtgggttccagacgtattgattatcctcaactggaaacccgtggtcataggcatcaatatgcatgaagatcgcgacgcgatggaagcgttggtggtagataacactgccactaccgtccacatgcgatatgacggcgtacaagcgcatcaggctgtcaaccggctggtcatgcatatcagcttcagcttcctcaaaaaggttgtttggcccatcgataccccatgcaaaaacagagaatgggaggtattcgtgaggattatcaaagggaaaggagatatcatagcagtgccaaggaacgccgccagtgacggatcaagccttggacgacaagcctcagcttcagcttcatcaccgaaggccgtgaaaaagttgtcgttagcattcagagttgccagtgggcggccttcagcgagccaggcatattggatcaggtagttgtgtagagctgcacatcgtgcgtagtccattccttcgagatcatctcgtggagggttatctggcctgacaagcaggctggtaatatccggaagttgagaaagatccattgagaaaaggggtgtgtggctgtcaaaggggtcaatatcacagcctctatccaaaacaccgaggaccagattagaaccctcggtcgtcaataaaggacaatgtggtatgatgaagtgttgaacctgttgagtgcggttggtgtacggaattagtaagctggaagccgtgccttaattctactgatcagctttgatttcccacatgtgcagctatcatgtactggtttaccccgctctcaggtacgaaggtgtatagcggccaacagtcggatgcctgattttactggttttataggctaattgggactagctcttaccatttttagaccgcctttaactcaatagttacatatgtaccatcttttgaaagtactaacagttccagagcagatactggaggataaaagcacatgacagaactctgagaattatggtgccagtgtcaggaaccagaaatttgctagaagttgaattgctcgacatagcaagcggatattattcgaagaactaatggtcggcttactttaccaacatgaatttgacacagttcaggtacgcggctctatgagtcggatagtttatgccgctattgttcgttggatggatggatggtttcatatactctggcctcctgtttttagcctataatgcaaatacatgattatctccaccaggttgttccatatttcctacgatgaactttgagcctcaccgtgaaggcctgtaaagagtgagattgacagtagtcaagatgtcagaatatcgtaatagtaaggtcatggaagtttgagattaccgtcaactttagtgagtttctttagccctgctgaaatagaaggcgctagtgacgaggaggcgcggcgaaactagtccggtatgcatctacaaatatgcagggccagtaagtcgatgtatatacgacattgacaattttctttaaaactgtctcacggagttttcaggtgtctcggtgcagactttttgatctcatattactgtgtctgcttactagacagcatctcctcgaaatatatatttagacgctatcggggaatgctatatccgaatgccggggagacgtcattagtgctttataatcaactttatgcatggcctcgggaagtttaactttattttttctcctatagttttgctctctaccgctacatccttctacctttttctatatgatactttcgtggtaattggtattttggggtcttctgctttttttttttctctctcgcggtaccgctagtagtagcaattacgagaaggacaactttgattcttggatcctccacgtattcgctgactaaggcccgactctacgtcacctgggcaggctacgccacctcgtccagctacttctcagctcatccttatcgcaattaagcaccccacagcttcaatcaattaatcgcaatggcagagaatatgaaggcgtggcagcaggccactcctggtcctatcgaggagaagctaaatctcgtggacaacgtcccacgccctaatgcaaccgccctcaagaatggcgagattctcgtccgcgttatcagcgcttgtgtcaacccggcagactacaaggtcacggaggcgggacttctcgcccgtgctatcgtcaagttccccaaggtgctaggcatggacctcagcggcactgtcatggccgtggctgagggatcgacggacgtcaaggtcggcgataacatccttggccgcgtcgaccccgtcaagtcgtacggttccctgtcgcaatacgtggtgctgcaacgagatggatatgccgtgctatccaagggcgtggatctcgatcgcgccgctgggctgcccactacggggttgacggcgtaccagtgcatcaagccctatgtcaaagccggtgaccgtgtatttattaacggcggttccggaggaacgggaaccttcggtatccaaattgcgaaggcccttggatgtcacgtcacgacatcctgctcgaccgccaaggtcttgctggtcaagaaactgggtgccgacacagtacttgactaccacaaggacgatatcgtggctacactccaagccgagggcccagtctacgatctggtggtggacaatgttggcaactcgccgaaagactttttctccacgacgcctatgtttcttaaaccggagggtcacttcattggcgttgggggctccccatcgctatccacggccaagaatatcgctaagggcctactgttgccggtcgcactgggtggcacgccgcgtaagtttgtttcatatctcaccaagaatgtacacgaggacttcgagcagctggcaacgtggctagctgacgggaccataacaacgattatcgagtctacctttgagtttgatcaggtaattgaggcctaccagcatctgaaggtgggctccagtgcgggcaaagtcattgtacacgtctcgcgcgagatgtgagggtgctgcacctctacaaagttcaatgaacgatattcattagattcttattggatcgatagcaactgcctacttcgtgagctctgaaatcgacgggctgtattcctagttgttgtatttgcattgtttgcgtggaatctttcttacaggtatcataaagagaagctgcccatcaattgctggatatatgttgaactaggaatatggcccctctaggccctaaacaggaaccgaggttttgttatggctgtaaatttcatattgtaccagcgaccccccctcctggccagtccgacccccctttaggctatgcgatccttcctacctgatagttcaggcataagctgaccgcctaacgtaatcggtaagcgagtggatcagacaagtgagtggatcaggcaatgcaaaacgcgtccatcaattagcacttagttaattcaaccacccaccatgccaccaattcgctcccaatcctctgcaaattcaacagagtaagagggtaggatcttattagctattcaggcttttcaaaataaagaaatctcttcaatacgcgaagcagcacgccgatttaacgtccccttctcttccttacggaaccgccttaccggcattaaaaatcgccctgaatctcgcgctaacaaccataaattaacagaaatagaggaggaatctctttaaaaatgggttctctctatagatctacgtggagctgctccctatccttctatggtttgagaaatggctaatcttcttctttaatagcgcggaactaccctagttctttcggtcggtaagaaatgggtatataactttgtgaaacggtatcctctcctttcctcccgattcttaaaataatataattataagtatacgaaatataaagaccctaaaatcattagggaatggtttaatctagtttaaaaaactattctttagtatagaatcgatctagatgatatttataacttcgataagacgggttttactataggattgactataacggtaaaggttataactagaagtaaatactatagtcggagatcacttctataacctaggaatcgtaagtaggtaactgtaattaaatatataaatacttctaggtaggcgcttcctctatatatgatttttaaaggtaaagtctttattaaatcttagttcgatagcctcctaggagattagcgctttaaagtaagtctaaacggttagacttctaataaaatctaataaaattgggcttcgctagctttaaaagctctttattctatcaacttttctacggttaaagggtcggtatcggcttctagtacttaacggtcacagaagctatttaaccccttaattcgactaaatttacgaggaaaacgatattataccaatttatatactaccgcatttatcttaccttttacaaccgcttgatatcggctgttttgcggtcctaaaacgatcttatagtcggttagttgaaacgaaaatacggaataggattaactatattaataaacttgactttctcgaagtatacccttctatataaattaaagcttttaaaccagagataatcaagaatagcttcttagtagctggtttagtaccctttttacccaatagggtacttttaaaactaaatatccggcttcgaaccctaaccccccctcctagccgggatagcgattgggaccctaaaactcccttaaactatatatagttacaaaagtaagctttatcaattaaagctttacttcgtataagattaagaagccctccgagcccattatactgcgcgataaatcaagttttaaaagcctactaaatcactatgcaatccgccgcctttcttaaaaaggaagtaagtgaattacgcgctgccaatgagaagcagaagcaaaagcggacccgatctataagaacgatagtccatgaaggagatctctcagttcaggaggttcgtgagctacggtcagagccatttaaggcctaagtagcgcgtatcaacaactatcgtgagcaggtttcagaaggtttacaaccacctccccgggccaggcgattgtatggaatatgtaggcagccaggacatagaagagagacatatccagatagatgatgattttagtttatttaatttaatggcgttatggtcgagataaatgcatttgaattcaatgggttacattgcctgatccactcacttgtctgatccactcgcttaccgattacgttaactagttaactactaactaactaactataaagtttcaccactttactggccgctttgcctacgatttgcagctatttgtatctttgctagcgagaaggtttgtagtttgcaacgtttgcaaagggtcaaccatacaagcaggccgcttctcactttacacctgcttcttctttctctccatcttggttatttttgacacgtgacgtactacgtcacaataagttgaggatttcttgtattaacgaccttcaatacatagcttatagaccttaggcattaaaattgaggaaagaagcatgaaattgtgagcagaatggtacattctttactatgtaaacaagaattcaagcctacagaaaattcaagaaatgacagaaatagctgatgcctaaagtctcgggcatggggtggggtcgctggtacaatcccctatatttaaacctcccctacgtcatgatacttttccacggttggcccacttatcaagtcatcaagtgccagtgcaacatatataggtccacggggtacaagagaaggtactggaaaagctatctcgaaagactaaaaagacacgatcaggccgcatactgtactgtactccgtacctatgcaggaatgagccgatttatcacgtgattggtttaaaccacccctttccttcgcagggcgcttcatggatatttcctcgaacaatcaacataccatgttacgctgcttgaaaatatttgctcgaaaaaattctgcaccctttaaatattccaataacactggcctcgcctcggccttcaattgcagtatgccaatccctttcgcgtcgaaagctcagctcggtgtctgcgtggcccagcaccacaatggctgccaaccacgccgagtataactggatcgagggcgtggagcatcttgaaaaatatcagcctgggggctatcatcctataatcatcggcgacgtgttatatgaccgttatcatgttgtagataaacttggctttgggggctattcaacggtttggcttgcccgagatactcgtctggagcgatatgtcgctctcaaggtcaacatatcacaagcgattccgcgcgaggctaaagtccttaaatctctgacaccttcgccggtacattccgggtatggtttagtgcctgttttcctagatgaattcgaagtgcaaggtcctaatggacaacatacctgctacacggtgccccctgcgcaatgcaaccttagagatgccgcctttagccgtcttttccccctcgatgttgctcgagcactatcataccgagtcgcacaggccgttgcttatacacattcacaaggctatatccatggaggtttgtcataaggatgactatctattttggatactagtaagctaatattatttattgatttagatattcatttaagcaacattttggtcaagctcccgtcaagttttgataagctctctatcaagcaattctacgagaaatatggcgagcccgagatgatccctatcacacgatgtgatggagcgccattaccccctaatgttccggctacggctactttgccgctattcctagggaaatatgccgagaaatttgtattgtccgacgcgcacccgcttctaagcgactttggtgaagcgttttcccctgcttcagaaatacgtcttgggcaagactgtcatacgccagccgcgtttcgggctccagaagccaagttcgaattgcaaatcccgctcgcctatccctcggatatctggagtcttgctaccgcaatatgggagattatgggaataaagtctatctttagcgctgaatatatgcacgaggatgaggtaacggctcagcaaattgatgttctcggacctatgccatcggagtggtggcagcgctgggaaggacgaccccaatttttcgatgaccatggagatccaacggagtcttataagagaaacaaatggcctccgcttgaggaaagatctgagatctgtatacagaaatggagacggaagtttgttggaagcgagattaaggaagatgagaaagctgcgtttctggatttgatgcgccggatgttatcattccggccagaagaacgaccgactgctgaggaggtgttaatgtcagactggatggtcaaatgggcattgcctgattgcgagcggagctaaagggattttcttgtgtttaatactcaatccatgcaccaatagtcagataacaaggactgatgcacagttccctgcataaactggatagcaattgagaatcggaaagtttcaaggtcctctgcggtagtatatggccaatatatacatcggaattctttgaaacgcgcggatataattgcctggtacctaacattgaagaaaagacagaaacacatcaacatcgatatcgaaacccgcgaggcgtgaaaggtccactcttctgtgacattgaattgcaacagattgacattttccaccagaggcggctccttgcacctgtttagcgttgacctgctatgtgcgagtagccgataggactgtccgtatattcttcaagtgactcctcgtctggccaaacaaccttcctagacttcggtccgccacgtttaatgccgtccgccttctccggggtatgagtagcttttgtaagagtatattcctgtttgccgttggtatacccgtgggacgccacatggtattcacgttcgagttgaccctcagtcttgaaggcgaaagtcccgtgccagccttgaggatctatgacatgcttgcccatacgggtagtggtattgtgtaacccagacctgattaataacaagttaaataaagtgggccaaaatatacatatgcacaaggctttggcggggatgggcatttgtctgtgtatcaaggtagaaaagcagacaccactaaccgaatcaatattgccttaggcgccaggaatttgtctcgagctgtcgcgtaggctagggctaccagcgatgccttcacttcggggctgatattgctattaaggtagaagaagattcgaacaaagttgactccctctaaagccgccatcgcttcaacgtccagcagaatagataaactgctttcacgccgaggaaactttgaaggttgtgggttatagcaaaggcatattccgttgaggggaattattgcctctttatatcttgctacttccctgctagagatagatggagaacttgtccacattgttgatcacatctattttttggtgtgatgaaacaagtgagcggctagagagctaagtatagaatatggaatgttggaaattcatggcgtatctgaggtgctcgttaatctcggcgctaaattctggccccaggacgtgatgggtggtttgtacatcgtactagcgtatttcaatatgtgtctaggccattggtgtggtcttaatgctattcatagtttatacagctctaatatctattaatgtactctgtagctttgaaattgaaaaattcagctgaaatctatgaacatcacaatgcttgtgctggtgaatctagagaggccagatattcacccctaaggcatcaattttcatgacccctggccaaaacatcgccctcccttcgaaaactacaccaaccacggaagtaattgctcttgacttggactcgaaatcacaatatataaatacttgtctcgagtggatctggatctagtccaaggattccgacccgcccgtcataattctgtcgaaaaacctgccccgctgtgtccgcggtgggaccagaagacgcgaacttcatacctcgaccacgtcaagaataccattgagttcagacgtatctctttcacgactcactaagaaactcctgattacacaacgcgtgtcgcttctaaaattcagaaacttctcagcctcaccgtctcacaagatgaggattgcaaccctccaattcgcgccgaagctaggcgacctcaaaggcaatattgagaaagcaaatgccttattaaagactggaaagactgtcgctgtaaatggaaaggagcttggggtcggggtcgatctgttgaagcctgatatcttggtgttgcctgagttggcgatgacaggtacgtactccaacaaactcattgagcagcatgaaccccgtctctagcatttgactcaacctgtgtaaaaatttcactggctaacgaataactaggctataacttcccttcattggaagcgattaagccatatctggagccagctggtgatggcccctctgcctcgtgggcgcgtgaaaccgctaggcgattgcgatgcaaggtttgcgtggggtatgcagagattgaaaacgattctcaaaattccgacaaagtcacatactataactcactccttgttgttgacgagaacggggagttcattctcaactaccgcaaaagcttcttgtattacaccgacgaaacatgggcggctgaaggtcaagttgagcgagggttccatgagcttgaattcggttcccagggcgcgctatcttcattgcaccagggtgagcaggttctatccgagaaaaaacggatcgcgacttcgtttggtatctgcatggatatcaatccgtacaagtttgaggcgccatttaccaaatgggaatttgcaactcgagttcttgactccaagtcccaacttgtcattctgtccatggcctggttgaccactctgagccgggaagagctagatgccttgaaggataagcccgagatggatacgttcaactattggcttcagcggttctggcccctgatacaaaaaaggatggaacatgaggtggatattgacggcggagaggcggcagattctccgaagaagatcgtcattgtcttttccaatcggtcgggcgaggagccaccgacggaggataccaagccaccggcgcggtatgcggggacaagcgctatcattgctgtgacgcaacgacccactgtcaatgttgatgcagggtcaggtgcgcacgcccccgatgaggaaagtgagacaaaggatgcgggcatcccattcgacatcaagatactttgctgggacatgctaggcgccgcggaggaaggtatttgtttcgcggatactacggcagatccacaaatggtatttgcactgaaataggcgtctgagtgaggagcgcactggacgcgtcagactattccacagataatgcagagtctatgaagtgatcgagggccctcgcgacatgacattaggaaatggcatttcgatcatccgagtttctgtcatacctcccactcccagaatatacactaaacggtgtatatctcagtttctctcagttccatggcgatcctccttgcaatgagaactccaccgattgccacaggctcatgtacaggtgatccatgtgataggggactcaaaacgtgatgacatatggaggaagatcatcgagatcgtcacaatcttcaggaaaagctcgaatacttagcttaatatcgcatctggaattgtgaggtcttatgatcactcgatcttcacgttcatcaatatgcaggcaagataccagggaagacccttttggatatccgatgcaaccctttggagatatggtggtgtgaaggtcttggggaattctatttcaatatgcttagtctgaaacatgtgattcacctctcccccaccccgatgagggatcagaagtaaatcgagaactaaaaacgaagtatgctgagattgtagaagaactcgtgttatatcacgatctagaccagcacacccaccacataatgcactactttgtttcccattgcaccaccgtcccgggatattccccttttgtgtttcctgattcagttgaaggcagtattcgatacactagccggtctagctaatcactttgcagggaaacaaggagggacagtcgcttccgatcgatgccgggtatattgaatatagttagtaggcttgtggttagtctagactacgccgctatacttgccaaatatgtgaattcatgaagtcctttgtatccgacggtctgatcccccccgtagtgggtgaacatagcccgtgattggcccagaagatacccgtacacgtgatctaggaaccccctccgagagccggtggccaatcagagacccataaaggaggtgtgcagcagaggggcacgggacggctgcacatgacttgcgttgagcgatggaggcgtagaatccccgggggaatccaagcattttagttggttatcttcagctcctgctgtcggtttcgttttggctgcgtttgcaaaattgtctagatcttcagggctcccaggtggctcattcgcggtctgcggtatgcttacgtcagtcgatcttttggaatagatcgatcaggtgattcactgcgctcttggtcgttctggcccgccggactcagcgcgactcctcctcttgaaccacctccttgccacgtgagcaatccatcttgaacttatccgctactctacatcttcctaaagaaacacgctttcttatttctaaatttaccgcgaggtagattgcgaagtattttgcatctcctgctattggcttcttcaaattttcatctttaccaattcgcgcgtctcaatttcgaattcggggtttcgcagacaacgtgacctgcgtcttgttgttgtcaggcaggtgacttcctgtcaggtgataaagagagatcatcccaaggtacggctccatcaatgccccatcttcatccagatttcctcatgtcattgcacctcgcgtcgtgatgtttatcgcaagtggtctccttcacgatgctgcccccctgtgtgacctcatctgcctgcaagccatcatgacgcgctcctgatatctgcaaccccgcggatgtctcgaggcatcgcattacatgcggtcgcttgaaacgtcactgcctcgtagaactatccccatgcactgccgcccgctagaataagactggcgatggccgagtccgacgcctcccggggatgccttacgagcgcgtcggattcacgcgtctgtttacttcgcggggtgcccactatcttcccgagggacttgatctctcaggcatcaacttaccccaggctgcattgacattccagtcatattgttctcttctcattctccgagactcgtttgtttcacttctggacactaaccattaccactaataggacgatccgctttagcgcttagcatgtctgatcccaatatgaacagcccggataatggctcgcacaagcgcaagagagacggctctgaggatctaggcgctgactcgcagcgacttaaccgctcttcccacggaagcaacggcagcatggataaccagcacaacttcggccatggaggcctcggcaactacgaccacgggcttcccaacaccggagccgaactcaacattgatcaacaaattcttcagcatgttggtccgcagaacggcttgtctgatgataacgcgttgactgccaatgctaaggccgccctggcggcacacacccctcaacacaagtacccccctcctcccgattccggcttcgatgcgagcaacctcacccaagggttgtcctttggcgatgatatgaaccagactcccatgggtggtggtcacaaccacaattcgactgctgctgcggtctatgccgcgcgcgaggctcagagtatgaaccagaagcctaccgttggctctcccgaatggcaccaaattcgcaagaacaaccacaaagaaggtaacaagaatccgtctgatcgggtcttgtttgcattgctgacccatgccctagttgaacgtcgccgccgcgaagctattaatgaggggatcaaccaaattgctcgtcttgtgccgaactgcgataagaacaagggcgcgatcctccaacgtgctattgaatacatcctgcagctccaggaagaaaagaagaacattgacgagcaatttgagaagcacagtctgactgctaatcatgccatcgctgagatcagcgtctcgaactccaaactcaagggcgagctcgcccggcgcaacaacatcgcccacaagtggctgacacgttgccgggatgccggcctggaatttgatgattacgaggagtccaaagagctagagtcactcgagatggattaagcttctcagcctaattcttctgcatgtgctacgacttgttgcgttccggaggtcaggatttgaacataccctcatttctctgttttttcaatctgctttgacagatcttttctcttactaccatggatgtttcctccagatcgatctcacctcaccatgaacttctcattactacccctcctgtttcctggaaatgcgttcccctggcattcattctgagtgttacatttcccattgactacccttgcgacttgtctgcgcaattttttccttctattattgctttcccctttgatcattctctgctcacacatttgcggtctttgtaccttactcgggctttgttctttcttttttccctttcatcattaatggattgtgggctggcgaatctacggctgggatgggttgccttgggatggagctgcgggttgataagtcctttttttcgaaactgttttattaaatctctttccttgtaggagttgtgccgtatttgtttaagcattgggataccttcctatccggggctgaggtggccctgaactcgggaggtcccgagcccgagtctcacccgcccctgtacggctctgtacggttaaagcgtcgcacagattggctacgtttaatgcacaatctataggagaatgtattggctagtttctgaactccatatttcggggctttgctttgcgtctgctagtcgaaacaccgaaatcacgggggggctccgcttccaggcgcaatactatacatggccatcaggaggggtgttcctagtatcgccgacagcatgtttgtttccttatgcttggaattaccccaaggaagtatgtgcacggcaccccaggtttcaggactccatctccttcgtgttatcccttgtctcgacagtgatgttctattaggaaagacgctttcatgaatgcgataggacaactgataatttgggcagatgtgttgtccctcggtgggtttgcatcactagcgactgcaggtgcccaaaacaagagcaacaagttctatgaatatctcataaggcgtcattgaagtttagcttcaaacatcaacagccaatactatcagataatcagccaccaaggtcatgtgcggagataacacagccctgatcagcttagatgtcgaactacccctctatgatgtcaacgcggagatccacctcctcctcttctacttaaatctactttctcctagtctcaccactacactacatctctattaactatctcaacatgccttcttcctatatcgtgagctactaactaacacatcccaaccatccacatcttgctaaccctcctagatcacgtgcaagccagacgcaactgacgaggaggtcaaggcgtatgcatctcacgctggtattcgagatacacacacgatgctaacacatgtcttttagcgtcaaggaacatgccaaggagcaaggcggcaaaattggacacgagtactcgttgatcaagggctttgcgtgagttatccagagcactctatcggtcttccagagtgagataggctaattctcggtcttggtgtttacagtgtttctttccctgacgggacagtccacagtctggactcgaaccctcatgtcgaaaacgtcgaggccgatcaggaagtgaagacacagtaatcatctgtcagatgtgagattttgcggacagcatacacagccggaggtcagattcgttagcgtgttgtatcatggcctatttgggttatgaggtataccactgagtctttaaaccagccaactacggatttatgaatagagcaaatgagctatatgattcagacagtgtgaccttgtagatcgacattactatagtagacttggataacccctaacacaggaatgaatccgttcaccaaaccaccacattaaataatatcaacagaagaaagaataaatataaagcgtccgcgctcaaccaatttacaagttcgacgcagcagtaaccgaagtgccagacacaaccgcgacatcctgaacaataacagtattgccactagcaccagtaacccgcacatcaacagtgctagtcctgaacccagcatcgtactcgaagaagttgtagtacgtgcgggttgtgccctgccacgtactaccaccgtcggtgctaacatccaacgcagtcacagcctcgttggcattaacaacctgcatcgagaaccagtacgggccggtgccatccttgttcttgagctggaggggtccgtccaggtcgcaggacacgtatgaccaggtcgtctcgatgacgccgagggatgtgtctgcgagctcggcgaaggcttcgtggaagaggtcgaggtggtcgctttcgcattcggggcattggtcgacgatctggtttgggttagatttagttggttaggacgggatgggagggatgggagggggcttggcttaccattgcggtgatggagttaccactcgggccggtgacggatacacaggtgccgcagttggctgcgtcatcccagcgctggagggagagggctgtgccgaagaggttgctcgggagggtgtagccggagaacgagcatgttccgccgccgacattgccgccgtagaaggtggcttcgccggcaatggaggcaccgagagatacagagacggtggaagaggaggtggtggaagaggcggcagcggaggagctagtggaggaggatgtagtggaggaggaggtaacagaagaggtggtagtcgaagaggaaacaatggaagtggtagaagtgctggtagcttcgacggcagcctgagtggtggaggtctgcgcggcggcgctcttcacgacgggagcagcaatggtctggacaacagcagcagtctcagttgatgcagtgaccacaactgagtcggtcttggaagctgccttctggataaatgcggtctcggcagcagaggttgacgaggatgtagtctcgactgggacaattgaagtctcggcgacaggggctgaagagaccgaagaggtcagagtctcaacaactgcgctctcaacggcagacgaggaggtagtgtcgactgggacaactggggtagcagaggccgaagaggtcgtggtctcagctgggacaactgtagactcgacagtagagactgaggaggatgtggtttcgactggggcaactggggtaggagagactaaagaggtcagggtttcaacaactgcgctctcggcagcaggggccgaggatgtagtctcgactgggacaactgcgacaggggtcgaagacaccacggcaacggcagtagacgacgaggctactgtgggctcagcggagggctgagactcgatgctaaccggagtagccgtcggggtaactgcagtctccacagaggtcgccgaagaataggtatccacagtgatggtcttataatagacgctcatagtatagcccttcgggcagaatccgtcatcttcgcgggcgcgcaatgggcccgcagacacagtagcagcgctaagaagagcggccacagaggccagctgaaggtacttcattggatatatagatggaagtaaagaatgaagggttttgcaagacgaggtattgaagaccgaatgaatgaatggaagccacaggttgactcttaaaaaggacaggacgtgcaggtgcactttaaaagaatggacgtctggataaagaatgccagattcgagagaattactgttccagacagcaagttgggagtgagagcgaaagaaggtatgaaaggggagaaaggatgggataggttagatataagtctaagggacctcatactccgtaccccgtggcttgacgaactagtaatttgatcatttcatagtaagaactacacgctaaacatgaaacgaggcgtgtatcatcagccagtgcaaatgctccggagaagctggaaggggtacttgacccatttcactaggccgagttagggctagtgaaagttgtttaaattaaagagggcaaaaaagaggaaatgactggggtcaaggtaaaatgagattctgttctaaggctattagtggatttgccaaagccaatcggaaaaaaaaactaaacaggactaccgagcatcccacataatctcgttcagcctcagtaacgcatccgcactagccttcttcgccgacataaactcctcgcgattctccgccccgcgtggaccacggagaaattcagagaagcacaggtcgacgagaacacgcagctcctcgtatgtaaatggctcgccgttcccagcagccaaggctttggcgccttgtgatgcaaaggcctccttctcttccttggcgtagtccaaggccttctccgcgccttctaggaaccagtccaggaactttgcgctgcgaggtagggcgacgatttcttgagaagcttgcgcgtgcaaatatgtagccgaatccggcgaatcgccagctggatcgatgatgatgttcttcaggttctgttggagaacaagcacatcaagctgcagtcgcagcgctccattctcattcatggcgccgatatactgggtacaggcgacaaagacccggtcgataaaccgtgccaggcccgatgtgatgaaccagcgctcaacggatccgagatacgtcgagatgttggtgtcgaatgcgatgagatcattgttgagtgcgaggatcgtgggtgatgcagcggttggttgattcatgataatgtgccaccagttgtctattacgtttggggatggagtgacgggttcagagttccgcaggttaggaggattaggcccagccattgttttagtcagcatgtgaatgatgccacagcggatgtcaacatgcatcgtaagaagtgcagtatccgcaagccggtgtaatgagtggatagtcccatcaaaggccacagcagtctcttggttgagtggcaaatgaaccgggttattgatgctatcacgattgggcttcatggacccgaacagagtccatctgcgagacggccggcctgttgcagtcagactggacgactcggaatccgcggtatgttcaaccacaagtcggattctcgcgaggtgacttgcaagccattgcatgctgttgtacaagagcgaaagggaaatgacggttttcgggtcggatatgatatcgtaaggctccaaaggcacttccgtcgttcgcttgaggagaaggtcgatttccgtatcaatcagagtctttttcttgtcccccgcacctttccacagttcatcgacgacatcatgaatgtcgcccgtctcagcaaaggcagccgctgctttcagtcggacttcgcctccacggttccgtgcagagattttcgtgaccattgctttgtaccacccacaacatttgtcataataggttacgatctggtcaataagaagctgcgtaaacgcttgatcgtgtggaatactggacagcattttgctaaattcccgaacaatggacatgaatttgaccgttcctttgaaaataggccgaggggaggccttagcccaatgggggtcttctgtaaatgcatctgcaccaatgaagctaagtgtgcagagatccgtcacagtttcatccaactggggaaggaagacattgaccatgaagtcatccaaaaaggaggtcaaagtgcccatagaaatatcggaatcaacagggacgatatccttgagccgctggatgaaggatagagagggaggaagaaggattcccatattgaagacacttggttcaagcaagatcttatgtccagtacccgagttgccattagtagggtgcggagtatcacttgttgtagccttttgccttgacttggaaacaagtccaggcactgaggacttgagaatctcatccaattcatcttgctcggctttcatctcagaattatgctcaatatcggacaacttgaacattttctataacggaaagggtcagctacttgaaagtaatgagaattactggcctacttaccttattcttatcgcggttgcctgtgtattgatgatggcgagggtcattttcctctgttctagatcgaaaagaagagtccccatcggttgcgaggtagtcgtgcatgagagaccgtatctggcaaagcaaattaatatttgtaatgtcagtcaaagctgttgccttacctcgctttgcagaagtttccacaactccttaaatcctccagaaagcgcctcgcttttgattagaccttctcgatccacaatggcggcaacaacatcatgaacaattcggtggccttccacaattgcctcaaacttggcatataaagcccacaaaaactcagaaagcacgtggccccgtttttcaatgatttccgtagggagactggactgtttgtaattgtcctgggctgagaagctcttggttggctcaggatagcgagtatcaacctctccgttcgtcttatccactactgcaaacagttcgactggaagacgctgctcaattctatgaactgcgacgtcaagatgtcccatcttgttcagcgcttcgatcaataactggatgtaggagaacgtgtcggcctccgggttccgggaggcatcttcgaccataggcgtcaacggatcgaacttggccaggaaactatacacaggccgttcccaagagtgactaccggccaaatgagacgtatgcacatcttttccatcagttgtgttagctttccatcggtccgagcaatagggtgatttaaggtatagatggtcgtgcaactcctcgatcagaatgtctgtgagcgacgtttcctggttgaggaaataagcacgaatatcggataaagcgccgatttcctcaagctccgaacgccgtagaactcggagagctgtgtggagcacatccacagctgcaaggaatcgcttatctgaaatctgagtttccaatttctcgggaagggattggatttcctcaatctgagtgaacagctgtacgatatcatcatagttctgagaggacgttgccagtcctttcaactccggtttggtcgatattaagccggatttagcctgatctagggcatttctcagactgcgtactcgattttgcgaggaagctatattggattggatcttgtggtatgttccaatagaactgttgaatccctgatggtgttctatgacatgcaattttagcatatacatgtcctaacccccacagagaggacctaccattgacaattgccttcagtgtcttctggatgtcattgtacatatgcaaaaattccggttcacgatctgccttgcccaatgtgctcgtgtccatcagactcaaagcgacgtgtactgggacacactcggcatcggtcatgaaatcccagtcgcgctggatagagtggagaatcgctgtagaaggtaaccggattagctattgggccaggttgagcaaaagagaatgtcgtactttcgatggcctgggtttcccccgagtcattgctcactttggccacaggcgacgcattcctctggctcctgtgttccatttggcctcgtgggtccctttggtccctttgactccttccatctctctgatctctccgacttgcatctctagaccgctcttcccggtgcttcctgtcgggatcttgatttcttgtgcgtgaccgcgaagaggctttcgcagagttcgatgagggatgcggggaggggttcgaagacggttgcggagagggttgtcgattcgttcgatcgcgccgtcgatcgggcgactggctcagcgcaggagattggcctggcgatagatccgccggctgaggcgtgtcagcgtagaaaccaccgtatccgccgggccgacgatctgaatgtccacctccacctggtggtggtgcggcacctagtcccccgtatccggttcccccaggattgctgtttgaactgtatcccccatcgttgccatactggttgggaccggagtagccatacccgttaccataaccgctttggccgctcatcgccaatgatacctcgcaatcacggggtgttccggttcggtatggaagcgttggtgggctgtaacaaggggctggcgtggggctgttagccagaaaggttcggtcttaagtctggtgactagcgcgcgacaattggcggggagctgcgagcattcttgggtgtggaatagagggagcgctggaagcaattcagtggtaatgtggtgatagtgttgaaacacgccgggtcgggctccaccagagcttcccgcattccgttccactggccagttgtcggtttactaagaaactccgaaagttgacaatgtaaactgtagatttgcagtatatcattgtgtcgttatgttccttgctagcatcatggtatttggtatttgattaaatcttaattattcatgtctaggtacagcactgaaatggtgtatacactactgtattctacataatcccttctaatcaatagcaggagtactccgtggctatttcaaaccacggcgcatcaacgctgcataccacttatttggaaattggctgggtctcacgcttgagccatgagcgtgtcaggtcgtctgactggaagaagtgctctgtcttcgcccatatctcagcgtggtagtcattcacccacttaagctcggcgtcgctcagaagcgacggctcaatcaagttacgaccaataggagtcattgtaacatgctcaaagcctagccactgcttatcaccaaagttgtgggcagttttgacttcgcgagccatgacaatgtctataaagagcgggattagtatttctccaataacagtcacagactgtacaactcactttcgattcgaataccaaatttgccatcctcgtagtatccgggttctatatcaggaattagttttggactgcaacctacggggaggagagacaaaccatcggaaatgacgtttccggccgcaatggggacctcggtatactgaacccgagttccgataccaatgggaccctcgtggacattctaaacaaagataagtaaagtgtaagatgtttgatgagcgataatactcaccagataggagccaacaccatggcctgttccgtgaaggtagtctaagccctctttccacaagtgttggcgcgccaacacgtcaattgcaaagccactggtgcctttggggaataccgccatatcgattccaatagttcccttcagcactaacgtgaaagcacgcttctcgaactccgtgggaacgccgaagtggaatgttctcgtagtgtcggtcgttccatccaagtattgacaaccagagtcgcagagatagatggcattaggatcgatgatagcacagcttcccttctctgggctatagtgaatgaccgcaccgttgggcccagtcgacgagatagtatcgaaggagagaccagcgaacagatcatgcttggagcgaatttcttccaacttgtcagctccgtcgacttcatccaagacagtcttcttgttgactagttcattttcaagccaagcaaagtactcggtcagggcagcaccatcgcggatatggcaagctcgcattccttcgagttcgacttcattcttcacagcctttgcatccgcgaccgggctacgggtctcttcgacctgtccctcgccaccaaggctgaggctgagagcccaagaagccttgttcgacaacaaaaacttggcggccttttcacccgcagacttgcctttggtgctgagggcttgagcatcagcaaagatggattcgtatggcttgacgataacgtcttgcccgaagtgagccttgacctctggcgtcaacttgtcatcctccacgtagatctcagcggtggtgggcgtaataacagcataagagaaaaacacggggttgtagggaatactgttcggagtcagtgaagtgccaagatgcattatagacactgttcttactcggttcccctcaggttgaatagccaggcaatctcatcgagcatagctgcaatgaattagtcactttgcaggactgggttatatgcgaggtggtcatacagatgatgaatccggccttcttctttgactcaagttccttccgcagctcggccaccttttcttggaacggcttgccggcatacttctcggggtgaacgcgcactttctcgctgggacgcgcggggcgttccttgccccaaatcacgtcgatcaagttctccctgacgcccacgagggatgaaccattctttttaagggtctctgccaacttccgtgcaccagctattgaagattagcgctatccacttccacgccgaagtaacagcactcacacgctgtgatcagagatggatcaacacccacagccttgcctccttgggcttcctccgtggtcctgccaacaaggtcagctcccatacagaccatgccgcataactgtcatctcgtaccattcctgccaagtgggcaccccctccactccacccttcaagagctgccagttgttgtccaattgtttcgcggcctggttgaagtaccgtccatcagtggacagtgcagctttgctcagggagatgattgcagtaccggcggagccagagaatcccgaaatgaactctgtgagaatgttagtgtcggcgcgaatcagcggaagaggggcgatcgttgacctcggcgcgcatcacatggcgcaatgtactcggactggtggctatcttctgagggtacaactatacgaagctggtaagcacaactcgagggtttgagaatagagatgatgtcatactgtaaacatcgaccttgtgctgttgcatcaactgccttagctttgacaggcgttcagaggtatctacgggccccatatcgactgtgtatcgcggaccgaaaacggagaagtgtcttggacgggagacgggccttagcgatcgcaaagatgtccgaaggcaaactggacgggagaggagcatggacactggcggacttcaagaggttactcatccacctgttagctttcgaaggctaagcgaagcagagattgaaggcgtcagataagtacacgataagctaattccgcaggtcgtgtggactccgtgtaagtggccttttaccggtggggagacttttggccgtagggcgatctccggagtcggctacacacggcccacttggtgttgtcatgtttgcactccaatatctacacaattgtatacaaccacattgctcgtttcaattttcttcttgttctttagaggttgatccagcttgagtgctatcgacaatggtgttatactaattcgttgtacgggctaagtcaagcttgataccttgagatatatgatgctagcaatatattccgcagtgagaaggtcagaatatatatcccacgtaggaaaaagcaaataaaggagttcaatacaggaataaagttcctataaatcgaccactccaagagtacagtatgtattataatgtatagtctgctaagacttctaagttctaacatctatagttaagcatatagaggtcacgtgcatacaaaccagatgagccccgcagttaccgctgaagcaaccgccttgatgctgattggccaagagatgcaaacactagattctgcccgtcatagctcccgtgctttgtatatgtacacttctctttttctttttcacaaccacgcgcttgctaaggaaaaatggcaacctgggtgtctgacgagggccttggggccagggagtcgatctcagaagcccatattgtatgcacaccatgtctacctttgaaactcaacagctaataaagaactagctggtcaccgagctctataacccagcgaaccaacgggaccccaccagaatcaatgagatccagacgcgcctccagcaacttcagaagatgaaagatgcatgggcaattgcggattcccttctgcaaagcgaacactctgcccagcatcgtttcatgggggctcttacattcacagtgaagatcaatgtctcatggtacggccaatctctctgatctactacctcgaccgcattcttatatgacgcataatttctgacttcggataccattaggaatgaaatcaaccaagactcggccgcagagatcatgcagcacctgatcaatcgctttgttacattggtaaataatggtgaacaagccatggttgtgagaaagcttgcctcaagcttggtcgccattttcagacaccctgccacaccgtggaaacaagccgtctggcagctggctgcaagccttgcccacggcgggtatgtatccgaagaacaatcgcaaggggtggattttcaggagcggatactgccagcgttgagcaagagtggatcgggtgcactcctatttttctctattgcgctcgctgaggaggctctccgactggactctgacccccaagatgggactggagatgcctcggctacccagcgagccatacacaacattaaggatgggttgctcctggttcaatttgtccttacgaagaccatacagcatgaaaatgcagctggaaatgatgcagttgatatcgcactagcggctgaagccatgaattcatggaaggtgagttaatattggtttcggtacttccatatcgaagagtgcaatcgctaattcgactcccaccttgcagacatggctaggtgttcatgggaatcgtcaacgctctttagctgaagatgtcaataccttggcagtacaatgtggccaaaccgtcattgagatattgagggtacccagcttgagtgaaagtgcagcttctattttgacccaagcctttgaaacccgccgttgggcctttgacgacaactcgttgtggcttatttctgatattcttgccaattcgatcgtgacagctcacattgctgctgtcgggagtggcgatgaaggagcagagagcatgtcgtttgttgacctcttgattgcatatgtctcccatttgaacttagatatattcagcgacccactgacccaacaaaatggagcgatcctcacacttatccacggaattttcaaaactcctggctatgcttccattgatgatctcggaaccccacgtgtcttggagtcttggaacgagatcgcagagagtctccctgatgaactcgaagaagacagccctaggtataacttggtaaagtcacacttagccgaagttgtcctaggtctttccagcaaactattatatcccaagacggaagatttggaagactggggcgaggaagagcggagtgaattcaatgccttccgtcatgaggcctgtgattacttgctctcagcataccccgtcctcggtgtcgacctggtcactgtctttcagagaagcgccacgtcctgcctggaaactcgggactggcgcaattttgagactgccatgttctgcatagctcagctctcagaagctgtggatgaaaatggccacgctgaccagtgtctcgatgccatctttggtagcgatgcatttgctaggctctgcgcaggcggggagactgaattaccactcaaggcccgccagaccctagtggattcattcggaaagtacgaatcatactttgagcgtcacagttcattacttccgggtgttctaaacattctgttcaaatcgctcaactttgagttgtgtgcgcacgcggcttcaaggtctatattgactctttcaaaatcgtgtgctcgcgtcttgacgtcagaccttcctgcattcttagatcaattggatcagttcagaagcaagccgacggcaactgtttccaccatgcctaaggtcttggaaggaatcgcgaccatcatccagagcttgcccagtgaccaggaaaaggtacaaacgctagagagaattctcggcttttttgtgcaggaagccaacacagcacgggaagaggttaccggacccgctcatgaatttggccgtctacgcggacacctcgtgctgagttgtattgctagcattggaaaaggccttcgctcagagagcgaagtcattgatatcgagcttatcaaggaaggaaacccatatcctccatctttctggaattccggaccaggcgccgaaacccagcgcctaataatggaggccatgagacttttgattgtcgacttccccgttgacagcagcataattgaagcagcttgcgacattttgaaagctggttacactgagcgggcagggctttttgtcttccccccctccatgacagtggactttatcaagagctttcccctcggtatttccgggacagatgtcatcatggcaaccgcgtcatcatttttggcatctcacgctcggcatgcgatgaatattcgcaccgaggccgaggcgctcatcgatcatgtagcccagctcttctcttcgatgctccagactccggatgtgtacgacccagagaccgctaatgccggtattgatttcctcacacgtcttttaccaaagtactatccgatattgttcaatcccgtgaagtcaaacctgagcgcagagtctcctcttgctgtgcttcttcacttcacacttcacgtattgacacggccagaaccacttcctcttaaatcttcttctgcattctgggttgcattaatagatctgcagggcatttccccagaagaaatgaacatactcgaatccgtctatcaagagtttattccacgcttgtgctacacaatcatccaccagattgccggccaatgcgcaagatcagacttggtctctctaaacgacgctctgcgacgtactgtcttcaagcagatggcattggcgcgcccggctttgaaggctgcgctcgactctttgaacgcccaagttacagatgcaaccggacaacaagtgccgcttttatcggcgaaagacaagtcacggttcttggagtctctcgtcattgctagaggtggccacaaacagtctctggatctcgtgcgttccttatggttgaaatgccgtggcatggatttcgattatgcccagtaatggggcttgcgcattgatacatgacctgatgattggagttgatgggtcctgcaacttcggagtccatttagatatccatttgcatgacatacgcggtgcaacttgatttaatcctacttaagagtttccatttgcatttacctaagcgccataatgagaattttgaaatatcgagtagtttggccacttgcgtagaaaaagacatccgacccagtgggcaaaagtcccaaccaaagttttatgctgtacctggacaaacaatgtccaaagtcccaaggccgatattgctagattcagcgtcagatttgatctttgtgatatatactgcgtgttcttgtctggcaaatagatcgattttatacagatgccatatcatgtgaccacatacccacttaagttagttagccttgacccactaaccttatcctacaacacccgtcgacagactacatatttgtacagactactccgtacttcgtctgcaattccatcactttcttcggtattatccgaacggctaaaatatttgagtagcatgtgacaagactgtttgctcgaggggacatacttcaaatacctccaaaggattttcccgtgattccccgtcatcggagtgtacggcgtaacaaggagaatgacagccgaagctccgattggctgttttccctagccgcgggcaaaaaaaaagccaatcgtgtcttttgctatcggccccacacctccggacatcgtattcgtatactacagaaattgtctttgggtcctggatgattctattaattcttatgtattgccttatcatacattgaagttgttaacatgcaattattggttttaaaatgacaaatgtatcaaatcatatcatatatatgtcacgctagacgcctactcatggctcatgtacaagatttttttaggacacaatgatcaaggctgaaacaactgacagaaaagcacatctaccaaccacggccagccaacttagcagactcgggcaattgcttgacgttgataccaaccatcgcctcaccaagaccctcgctgacttgagcaagcatcttggggtccttgaagtgagtgacggcctggacaatagcgcgggcacgcttcttagcatcgccagacttaaagataccagagccaacaaagacaccatcgcagcccagctgcatcataagcgccgcatcggcaggggtggcaacaccaccagcagcgaagttaacaacaggcagacggccgagctccgcaacctggcgaacaagctcgtacggggcctcgatctcacgggcgaacgcgcgcagctcaggctcggggtcctggctggcgaggaggataccacgggcacggctgacctgcgcattgacagtgcgcatgtgcttaacggcctcgacgacatcaccggtgccagcctcgcccttagtgcggatcatagcggcaccttcggagatgcggcgtagggcctcgccaaggttgcggcaaccgcagacgaaggggaccttgtagccgtgcttggtgacgtggtagacatcgtcggcgggggtgaggacctcggattcatcaatgtagtcaacgccaatggcttcaaggatctgtaggccggttattgttagtgatattgtgacttttatttgcctcccccgccaccgggagatctccgtttcccccctccatctcccccgcatagaggtaattttttacgtacctggcattcaacaaagtgtccgatgcgggcctttgccatgacgggaatagtcacggcttccataatctccttaatcatgctggggtcggacatacgtgccacgccaccctcaacgcggatatcagcggggacacgctcgagagccatgacggcagcggcaccggcttcttcggcgatgcgagcctggtagaggtatctgttagttttttacacactgaatagtatcaattccttgtcagggagatcatacctgctcggcgttcacgacgtccatgataacgccacccttcaacatctgagcaagaccggccttgacagtgaagtcactgccggtggatccgtttggagcagccattttgaattgtgtagctaaaagaagggaatatgaacagaggtgaagagaatgaatagaagaagtgaattagaaagaatgaaaaagaagagaaggattccaaaagtgagtcagtaggaaatacacttttccctcgaaagttacttgcctcaggccaatcacatgcaaagtgcccctccgctggtccctggaaagtccacgactctccgtttcccgagggcatccccatccgatggcagaccgcctgctgtctagggccagtcaccttgttacatggatcttggctcttggcttgacatgcctaatgcagtattgcctgatgcagtatgtgaggtacctctctatcacttgcatggcagatgacagacagcaaactcggggagaggcaccgattccgacgttgactcatcactgatattccactttatcctattctggcaggagagttgcttgctccaagcataacactgtgccgccggtctgtatccatctataaaatatggtccctactatgtactccatacacactgtacacgtacgattcagggtccatcaatgatatgtactccactgctatccctattaatgccatttacgcattccaaatgtatctcccagcagtcgcaatacacacagcatcctaacaaccttggaactaacccaacaacatctaaagttaaagttaacaataaaataagaaaacaacgaccaaacttcccaaaaagagcctcaatctttcccgaggcgggcagatccccatgagctcatccatatatgacgtcacttggcatccccatccgccaagggaagctcaagctcatccccgaccacaaaccctccgagaccgactctccaactccctcaattgcaaaagagacaagcaaaacagacacaatgtccttcaagctattcactcaccaacccgccaccctcctccgcctggggctaggcgtcggcatcggtctctccgccgcgaccatgcatcccttgtcacctttccgctccaccccaatgcaatgccagtacaccactccccatcaatacagccccagcaaagagtcagagtgggctattaatccccccgaacctgggggtctgaagcaggctcgtccgcggcggaatgggctgttgaacgcggagactatgcgccaggttagtttggggagtgtgttggggcttgttgctggtgttgggttgagggcgttctcgaaggctttggttgttattttgggtatgggcgttgttcttatcgaggtatgtataagcttctgcctcggatttggggcttttctttgacttgctttggtgtttcgctggccgaggttatgggttatagttgtgacaagatgctgatgcttcttctcgatcttagtttgctgcggccaaagggtacaatattattccgatcaatcggattcagaaatatatcaaacgcgttgacttgggtcgcgtcatgactgagaaacggcctttcaagatgagtttcggtgctatgatggcgatggcggcgtttgcgaagttctagacttttcttgtttgaagatctaacgctacctgtacatacactcgaacgacgccaagttggacgccaattgacaaggacgcaaattggggctgttggatgcccgattagaattaataaaaagttcattcgtacaggggtatcatgagtcttgatctattccacaacaaatataagggaggatctacgctaccccagcaccagatcctccagcacgccctccatttcatcccgggacagtggcacacctagtatctccatgccgcttgcatccatgcgggaagtgatcatctggtggtcgtggaactcctttagcagggtacggaacatcatctccgaagaagcgacaaactcctccgttgccttctggtaaaggagacggaactcgatgccagtttcatcgccagccctgccgccaccctctgcaccttcatcgtctgactggtggccgtcgtccagtagagtgatgaattcggtcagtaggagacggtacaggttacgcgcattctcgggaagactcttgagcacaaagcccacgccatctttcccgccgacccggcggcccttgcgtccaaggagagtgttgacctcctcgacgacgtcagcctccgctgagaacggtaggaaggttgtacagtcatggaagacgaaattgagctgatcacgcagactgatatcccacatgaccgggaagttgggggtgtcggctgtagctaggagacggatgcgcggtgttgcagccaaacgggcgaggagtgcttggttggctgcgcggcggagaggcggggcatcaatagagttgatcaaaacggtgacgggctcttcgtgcgacttgagcgcagattgtagcagctcgaggacttcggtcggctgtgcaccaagcttggatggtgcatcgtcacccattacggctgtgacgatcgtggcgaagatggatcggatggagatgcctggtgtgtaaccattgaccatcacaatagttggagtcgtagtgtctgacaagcggtggttgtaaatccactccgcgaattcatccattagcttgcgcttggagccgtagccaaataggcagatgttgaacccttcatcgaactcgaatgcccactgcgggaaagatcggtgatgcaaggattgcaggtattccttttcttctttgcacggatccacatattgtccaagcttctcgaaatattcctcatgggttaacagcgttactttgttgagggtggcattcgatgtcttgacaggaccggcgcggttctgaaagaagtatcgttcgtgtgcaggcagctcgccttccggtgtcggggagcgcttattcctcgcaccttttggtcgtccagcacggcgctttggttgttttgctcccttttcaggggcctcttctccggctttaggttctatactctccgccagcgactgatccactttctccgtatcaggcccatctccatgtaagatttcctccgctagtcgttctgatccatcccaagctgcatcttcgtcctgctcgaatagcactcgtgcactcttcttgcgcgcagaccggtctgcattcttaactcgagatggggtcgccgcgattgcggacttggccttggtaggcgtagcgaacaagccacgagccttggatttttgggtgggcgttttcagcccggactgttgtaatggcgtcgcggagacaccgttggcctttttgggtgttgattggtcgagtcctgatgggggaagttcgtaggaggaatcatcgttcggaagtgcggcgttgggcgcgtggccgttcaaggcgccattggattgttctaaagctgtccgttttctctttggggtcgaaacaggcggctgatcgccggtgtctgagagcttacgcttcataacagtctagtcagattatagtcacgtagacgcgaaggagaaaggaagcaacagtaccatcagatccggagaatgtgcacagggtcgagacgcaaggggcttccaaggttggtaaattcaagctctcgtaattgcaaggagctgcaggtctgacacgggaatgtaggactaattgggggttgattgggtctcgaagtgcttgaaggaatgaaattggagcggatgggtttctccgactccgcgtctgaggtttggaggtatacggagtactgccttgaattcaacacaattcgcgagattttacctcgtttatcctcatgtgtgtcgtctgtggtgtttctagttatttgtacgaaaatccttgatttgtactccagagagctggctaaaaaggtcgcgcaagtcatgtgagcaaacgcactgatcagactaaagtccaattgcctagatgttcctcaaagtcctcaacaagaagaagaagcaaatcaccggatattatccccagatatctcaatagcagtgggctcataccgcgcaattagttgccgagtggggagccccgagaccggctactttttctcttggcttaagtttgactcacaagagcaccactcctcataaaagctggggtctacaagcctagcaattggcatagacaggacacatgcttccaactactcaatccgccactatggctacctccctcgcccgcatgctcaagggccaagtccgatgctactccgcaccgctggacatggctattccggcctctaaacagcgctacatccccacgaccggcacctaccccaagggcttccaggtgtctggcacctatgtgggcgtcaaggcctccaatacccgcttcccggatctggcactgatcgcctccgatacgccatgctcggccgccgcagtgttcacaaccaacaagttccaagctgcgccagtgcaagtcagcaggaaaaccctgcaaagccgcaaaggcagtggtatccgcgccgtggtgattaactcaggctgtgccaatgccgtcaccggcaaaggcggtctagaggacgcagtggagatgggaagaaaagtagatgagtgcagcggtgtcgagaatgacagctcgctggtgatgagcactggcgtgatcggacagcggtaaattcaccatcctattaggactgcacatataccgcaccccattgctaacgcaacaaaccactcaccagcctcccgatctccaagatcctcgaccgcattccaacagcgtactcaacgctcgcctccacacacgaagcctggctcacgacagcccgcgcaatctgcacaacagataccttccccaagctcctctcgcgcaccttcaccctcccctcctccccagaccgcacctactgcctcgcaggaatgaccaaaggcgccggcatgatccacccgaacatggcgacacttctcggcgtgctctgcacagacgcggccgtcgagccggcagcgctgcagtcgatcctgaaacacgccgtgtcgcgctccttcaactcgatctccatcgacggcgacacgagcacgaacgacacgatcgccgtgctggcgaacggcgctgcaggcggcgagactgtgcgcgcaccggcggcgtctcccagccccgactacaccgcgctgcagggcgttgtgactgatttcgcgcaggagctgtcgcagctggttgtgcgggacggcgagggcgctactaagttcgttactgtgcgcgtgcgcaactcgccggattacgagtctgcgcgacagattgcttcgacgattgcgcgctcgccgctggttaagaccgctctgtatggcaaggatgctaactggggccggattctgtgtgcggttggttatacgcagggtgtcgcggaggggactgttgttcctgagcgtacttctgttagcttccgtccggttgatgggagtgaggttttgaagctgttggtcaatggcgagcctgagactgttgacgagaagcgggctagtgctattcttcagaacgaggatcttgagatcgaggttgatcttggtggtggtgaacagggggctgctggatgtggtggtgaggatgctgtttattggttctgtgacttcagtcacgaatatgtgaccatcaacggtgattaccggacttaaaagagatgtattttagcattgccagtggatgttgcctaatcgaggaactcatttcggactcgaagcccttttggagcgaggatacctatagttacaaagaagagcggttcaacgaagcatgaatgtgaacaaggttgaggatcatggcaagttgaatatatgattttggtttttctagacacatatggttacaagaccctaagcagggcacttttcatcgctgagcaccacctatccagtaagattagacccatgtgatttcacacatggacgacctaagacattgacactgttgtctcgatgtgcagaggtccctagagaggggcctcggagcgttcatcggcaggctgatcaacctgcacgactgaatatcaatcaatcggtatagttccaattcagccagacagacggcgccaatccattcacccaaaaaagtatagcggacgaaaaaaaagacaaaaataaacagagatgttgcaaaggaccggcgtgatcctatgtcatgctgctcgtgaaaatacggacagtctctttagctgccggggacgaggcccttgaggccagcgccaatgtcaccctcacgggcggcaatttcgaagtagccgtaaatgatgctgtattgagctgttagctgaaatgaacacaattgatgtatcaacgaagtaacttacgtgacggcaagaagaataccagtaccgctgccgagggcacccatgaggtcagaggcgacggaaagaccaccaatgcaggcaccaccgaaggcagcggcagtagggataacgcgcttcagctccttgtacatgctctgctcgcggtgaccagacatgacgagaccctggtccttgagctgcttggcaacgtcccgaggagcggagccggaaacctcaatccaagtcttggagaatagggcgcaagccacaagcatgaaggtgatgtagacggcagtgtgaatggggtcgaggagagcctccttgaagttgagaggaggcgacatgtagtaagcaatacccgaggcggcgtaaagctgagcagatccctcacggggctcccaaactccgagaagctggaccaggatgttctccgagaagcgcgagtacagcatctgactgataaggaagatgttggagcacagagcggactggagcatgatgggcatgttggaggtgtagaagaggcggacggggtatgagccgcgcatgccacgctggcgggaagacttgacggggatctcaacacggaaaccctgcaggtagatgacagcggcgaagacgaggagagtagccaggaggttcatgacgttgggcaggttctggcggtagaacgcctcgtacagggcgcgctgcttatcgggccaggtcagaagaaggtggaacagagcaataatagcaccctcgaactcggggccacggccggtattgatggttgttggggagaaggccttccagacaatcgactcgcaaatgttggtggcaatgaacagggagataccgctgcctagaccgtagcccttctggagaagctcgtcaagcagaataacaacaagaccagcgacaaccagctggacaatcaggagaacacagataccggcaccgagatcactgggctggccgtatagaccagtcagaacgtaaacacaggcctgaccgaaggagagaatgatagcgaagagcttctgggcggtctggtagagctcgcggtcggtcttcaagtcgaggttgacatcaatgaggtgggtaccggcaaggagctggggcacaaaatatgtcagtacaatcaccgcgaagaataacataggagttttttggagtcgcatacctggaagaccatgccggaggagataataggggtgatacccagctccatcagagtaccccggttactggccagcatcatacggagccagtacagggggtccgaagtatcggaggagacaatgccgtaaagaggcatctgactcatgaccaagaagatcatcaaagtcaactataacgtaattcattaggacccaagtcgatttcgcgcggagagggcagattcagggcgacatacaccagtccacatcaacttttggttgaagggcaccttagtctcaggagctgccacctccgggaggaggggcgtaaagggcttgatcaagtcaaggaagcgtactatattcctccatcagcatttggccttcaattgagggcgattcgagacggattgtcgggattgcgcgacgaggtttcgggggactcacggccgctcatggtggctatcttcctcccagtccgttaaagaagtgaagaaagctggagtcgaaaaccagctaaaggaatgaaagtgaatattaagagaaataaaacaaaaggagaaagggtgaagttgtcgaaaggatggggggaggagggaagaagaggacagaagaggtccgctggccacttttcgcttccgcgctaattaaggccacttggtcttcgccgcaacaaccaacttggtgactcaaccaaaaaaaggaacggggtgatttggagagaattgcactactttgagcttcaattcaattctcaatgcatttctcttctgctagtctttcaagtccgatgtgttgtgcaccccccaaaacagggctccaagctatccccacactccacagaggccacggtactaactacgcgatcgggacagctgggggtctacaccctatggtgcaagatatgggggtaattattgggaatcataatagcatacatgtccaaatacatattccgactgctttcatcctataaacatgtaccatcattctataaagagtataatattgccatctttcaaggcccaacaagacccaggcaatcatcaatgatcacctcgagctctcccagtcgattctttaagccgcggttctcctcttgcagaacacccatcacgctccaggcctcggaagcgggcacgccatagcagttggtgcaattaggcgcgttactgttaccaccagcgaaggagctacctaaacgcgttgaggcaagacccttcaagacccgatcatatgccgagcgtacaggtggtggtgtactcgtggccgcgactaggttcttctgtgctggtgtcgggaccgtcggcgtagacagggcgatctgcgacatgttgggagacggcgctgtcagagcggaggtcggagattcgacaccctcacgcagcgagaagatgctttcggcgatgctctcgtcaccggactcgaagcccgagtcgctggtgaaggtgctatggctagcacgcttgcctccacgccggggagtttggagcgccatggaagctgcgtcgtcatccggatacacagtacgaattgcacgactgcgatggcgcgattcctcggtctttcgcatttctctctcctcctctagttcctcggccatggccttcatagctttctcctgatcgagcaccttggcggccatgccgtccagctgcatcttgaggtggtcaactctggcgcgagtctcttctagctcctcctgcttttcgttcttgtctgccaaagcctggtgcatggcaaaggtgcgttgcttataggcctcctgcatacgtcgtagcactttgtccgcatgatctcgtagggaatccagtgcctcatcgttggtatcatccgtttcgggtagtctgagagcggcagtgatgtccaagttcaaaaactcatcatctgctggctctgggaaattgggtttgctcggttgtcgccgcaggccgaagaatgaaaaccgattcgtcgaggtcgagttctgcctcatatgtgacatggatgcagctgggcgggaatccaatccggtcccatctgaagcacctggacccatattaagccccaactcgactggatctgatttcccctggaaccaatctgacaagaccctggctcttgcttcaagcttcttcttcggaaaggtttcggaccaaggggtattctttgggtttgatatcgtgccgtcgatgccctgttcgaacagtggaggccttgcgatatattcggtgtttgctcgacgatgcgaaggcggattgttcaactgatttcgtgcggttctagggaccgacgatcttgggagcgtcaaggcaacggtctcgtgggggtgcgtgccatcggaatgcagggtgacaggcgcatgagtaagatcgggagacatgttctgaggggtaatttcgacagatacacggacaggactgaaatgccacgtcgattcaggcccaatgtggcgttggtgtgcgacctaggggggaggggtttgcggtaggggtatcaatgctgatcaaggacaaaacagacccctggaatatattcaaggtcaaacgaaaaagggtataggtggtttcaatgaagctttcatgtttcacagggttgagtgtggatttgtctagtgaaaccgagaagacgcctcaagagtaggaaacaagaagacaagaggctgggacgatgaaatagcggtggctggtctggagctctctccaccttcgtgatccaccacgtcttcctttccaatctgattaatcagagcaatgagggttgccttccactagacttatttcgagctcgatcccgtcatctatttttgccgctcccgctgtgcatgctttcagctgcacgaggacctgcgtcattgcacgtttctgcaaaatcctagcgtcatggctcccaacagtttgaagcatttatctaacgccctggcgacgcccgatcaactgtctaactcttcgtcctcgatcgacaatgtcccatctgacctcgaaacctctattcggtgcgcgggcgcccagctaactcaagccgctggggtgctcctacacctgtcgcaagatataattgcccaggcggtcgtgatcttcacgcgtttttggcttggcgctgatgggggtagcttgcgaatctactcagtcaaggtaggaccaactcgaggaatcctagccaattcagatccactgaccggagcaggatgtgtccgccgcagccttgtacctgacggctaagctttccttccaaccaacatcgccacgctccgtcctcaacgtctacacattcctcctatcccaagacgcgtcacccttgtggtttgtgaaacagggcggagctccggagacccctccatcccccgaaacctatatcctgtccgagggaggctaccagtccgcgcggctagtcctcctccgcaccgaaacgagtatcctccgtactctcggctttgatacacatgttgctctaccacacaccatcgctttgacctatcttcaaactttgggtgtggtaaagcccgctgtggctcgacgggtcatccagcaccttaatgcggcgttgctctcgccccagcttctttatgtcacccaccaaccaaatgccctggctgtggctgctatctaccttgcttcgcgggaggaggaggtcaagcttgtggacggcgagtggtgggaagtctttgatgtcgatcgcgaagagctcggctttttggttgtaggtatgaagagtacagaaggtttcatgcgagcggaggtcattcggtggaagaacaaagctattccaatggtagtagatggagtggatgtcgaaattgagcgacgccgaatgatggaggagggtgaatgaagcgctttgattttgctttgattttgccgagaacatatattccaagatcaaaagtctactgggaaggatgttctagtagaagctagcaagctatctactagaacattcaccaaggatggcaggcattctacatatcggcagaaggcctcacagtcaaaatgcttgcgatatcctgctccgcgccaagaaggaattcaagcaacgacacccaacactaaaccgccttgtctctgtggtggccaaacaggcggttggaaagttagctgcttccacggcttagtcgattgccagggagctctgcgactgtcaagctgaacctatatgttatatatatcttctcttgtggccgtaacaatcaaagtagatgtatgaataatatttcagaactcagctgacaagatagctagataaattgctgatcataactgaatgatatagatgcttccattctactccatctgctctgctcgagaaacaccgtcaacagcttattgatgttgtcctccaatcggcgctccacattcaggacatttccatatccattgaaaacgtcaattgagctaccctagccccggtcctgttattctgttcgggtacaggtactatggctagaacaagactgcggtgtgcacttgcgactacattgcgaatgacttctattctgttttcaagcgcctcgaggtcggccttggagcatatttcggtcattttgtggactaattcgtccaatgacccgagaagtgaagggaggtcatcatggaagtgtgcccgtcggaccctgcgtagaagctgatacagggcattcaacagcaacttcaccatttctggagtgacaagagtccaatcattgtcatttcgctcacagctgtttatcatgaaacgacaaacgctttccaaaaacccgattgctcgatctccattcgggccgccgaaggttgcgtacatggtgccaacaaatgaatcaacggagagacaatccaagagggaaggatgggtaatgactttgagaaatggctcaacatagacaggaatacggcgactccaatcttggccggtggtatcaatagttgccaggatgaacccgtgtccatcaagggcatcatccacgaggtctctgacaaggagctgctggtcccctgtatttccactatcaagtatctcaaccgctccttcccacagtcgaaggatctcttcttgtcctccccgggatctgacaccgatggaattcgttctcaggatctttttccagtcaaagtatcgtttccgggtgctcgaatcatcagtcgtaggattaggttcagatccgctagctcttgtcaggtcgtgagagaacttgcaggtagagccgtaagtgcaatttccacgctagaatttccggcagagtttgtcgctttgatgacgggtcccgaagttattcgacccgcctcgcttgctggtatggccttcgcctcggaatcgccagtttccacggtcagccatgatcgtaaaggaggtaatctgagtaagtagggaaaaagatggcagtaattttctagagaagtaagttgctggcacctaattatatggtacgggttatagctaatagcctgtatttgcgaagagcaaacgccgatatgcatcgtccctagaatcatgtatcttgtttccgaatggcgaagcaatcacgctcgttcccggtcttaacctcatgtatacagacaaggtactgattcttgcaccgctatctaggcgatctatcctcatgtccatacaatgtccgcatcgtggccctttaatccacgagacctgcctcaatctcgctaccaactccctcttaatctcgtgcttacattcaccctcttctacatttccgagacctgtggaaaggagaaaggtacattctgcaacccctattctagcgtagaccgaattttccatggaaggtttgctaggtcaagtgactagaaacggaaatgaatcagaagatatatatactctgtatcgctcgtcacgttaacagggcctccggaaagtgacagttttacataagcagatatcatcacgtgccaccatatcggttcagaatgacgctcacgcggggcggatcatgtgctccaccgcttatcatttacccccgccgcttcttctgtaactcttccttcaccttcacctgtaaaacacaatgaatatcctgcactctacattgtcaacttggcgggaccgcctggccccggtatcgcgcacttctaccttccgtaacaccggccaaatcactcccgaggagtttgttctcgccggagattatctagtctacaagttccccacatggtcatgggccgacgcatcgagtccggcaaaacgagtctcctacctcccagatggcaagcagtttctggttactcgtggagtaccatgccatcggagactgaacgacaactttgccggggatgcaggactcgaggatgagattgtgagggatttcctatctggcggtgacggcgaaggcacaccggataatggagaggatggatggttgcggactggcggtgggcgtgatgctggggcagatcatgataagcaagaagctcggatccgcgacgtgcgaaccgtcgatgaatccgggaatctgggcgagcaggaggaggaggatgatatccccgatatggaggatgaagacgatgatgatgaagccattatccgagagaccgataatcattcagggacacagtgagtgctattttcctatcttcaacatcacctttctcttttctaaccgtgacttgttatcgttccagatctctccgcacgtacaccctttacattacatactcaaacttctaccgcacaccccgcctctacctgtccggctatttgtcgccatccgaaccgcttccgccacatctgatgatggaggatattgtcggcgactacaaagacaagaccgtgacgctagaggacttcccatggttcgagggcagcgtcaagatggccagtgtacacccatgccgccacgcctctgtgatgaagacactcttggatcgtgccgatgccgcactcaagcttcgccgtgacaagctcaaacagacgcagtcgcgcgaggaagcgaaccgcgttctccgggcaggcggcgggctggagggcttggtggatgagaccaacaacctgtcgctcggggactccaacaacggacatcctggcggggatgagtgggagatgctgcaacatgacgaggaagaacaggtcgcgatccgtgtagaccagtacctggttgtgttcctcaagttcattgccagtgtgacgccgggcattgagcacgactttacgatgggggtataatttctttgaattgatcaagactcgtcctatccgatctttctatattcctgagctaattggattggataatggctgggatctggcaacctgtcccctttcgaaatctgatatgcatgaccttacatgagttcggcgttaatctgcttctaggcgcatggttaatatcctttccccttccttgggttgcttttgctgtatattatgttcggtagcttgggatggggttcccattgcaattttactacaatttgtgagaataccagagtagacacatcttattgaggtcatatcatagtcactagcattcgaagtaagaccacggggtaccgagaactgagctcgggatgaacaaggagatccatgcattatatcctactcatagatgtatgtaatgcgactatactcaaatttgggcatatttccagctctttgcaattccatcaaatcaaaatcacaacaatcatgacctggcttgtcgactgctttatatataaaaggaatgatgtatccaggcactgactgacgtacagagaggcaagagcgaccttgagggtcagtggcccatttgggaaggtacgtgttcctgggggtataaaagggcccctccccccatttttcctcttctcttcttctcctctccccatccctctgaccatcatctctccgtagcccccatgagacagcgtaggcagagggtgccgtagcacatgctgcttgacctaccacagggatcataacattaccttgtttgttatgaggtccatgtaggtctgcatcagatatcaaaccgggcgttctcgtggatgttcctgaagtcgtggctctcattgccatttgacaagtcccacagaatacatgaggggtgtaaatcttcgtagccgaggacgcgaaggtagtcaccactgcttcacctaccacagggatcataacattaccttgtttgttatgaggtccatgtaggtctgcaccaaacaacaaaccgggctttctcgtggatgttcctgaagtcgtggctcttattgccatttgacgagtcccacggaatacatgaggggtgtaaatctccgtagccgaggacgcgtgggttcgagtcatcgtacactagtcacctaggtacaaggcaaagaattaccttatcggtgttcacattgctaagacctagatagactgcctagagcatctcgtgcgttgaaaatgatgcctggctatccgactgctcgtttttcgcccacagctatcacaacccatttttggattagggtatcccgagctggaatcactgtgaagcattcatgtgtatacgaatcgaaggacacattcatagggaaagtccaataagattgctcatgcgaatggatgctggtagatgtgaaatatataatgcagaggtaaaaccagggttgaatctgtcaggttctgcatgagtcgttttatgtgagttatgagatatatatcttacagatttgaacctcggatatcatatgctgttcactccacttgtacggaaaccgtgcgaagtctcgagcttcctaatgcagtttatattatagcttactctctggtctttgctaccaggctttccaagtggtctgtttattcaggatcataagatctcgggacactcactacactaggtgatcttctgagcatatattcaggcgaaattagagaatccaaaatctaccaggatgtgaaaagcggcggtgtatcatcagagtaatatattctaggtgataataacgatatcaaaagccgcattaacaagagacagcgaaccataagaaccccgaatagtgcaaagcacacccagacgcccaagtgaacaaccatcagcagcagtaataaacaagatcagaaaagagtaagtaataaaaatcggccctcacaaacgagcacagaagatacaaataatccgtgggtgagtacaccagccgacgaagacaaattataaaaagaaaaggaaaacaggaagaatacagtcgtgaaaaacaagagatgcatgcaaaggtccgatcaatcattagatagacctaccacatcgttaacagatggatgggtggtttctatcctggtcatttccgccattttttatcgtgtacgtctgatacaagcaggggcttagttgaagaaagccaggataacggggagagcgagtgcgaggacggatccggggaccagagatgagccggcgttgaagacgggcgcgacgggtgcggaaggcacagcggaaggtgaggttgatgcggtgggtgccgcggggtggatcagagggatggagacggagggggcccaggtagccggagcggtagtgagaggagcgtagatgggggtggtgaaggtgggagggaggatagtggggacgtcagaccaggtaggagggttggtctgagcagggggagtgacagtctcggtgggagtggtggtagtagtggtgggcacgacaacagcaggggtggtccaagtggtggtgggcacaacgacaacggcgggaggagtggtagtggttgtgggaacaacgacgatggcaggagcagtagtagtagggacgacgacaacgggaggctcagggcaagggtagccgccctggtggtcgtgaacgccattgccgacgttgacgctaggaccgccggggataccgacattgacaccggcgccggcgctgtagtcatcgcctgagccagggccgcaggggccgcggtggatgtcctggaatccggcaccggcgttcacagagggaccgccggggatgccgactttgacgccgctgccagccgaagtctcgctgttgtctgggccctggtgggtggtctcagggccgtggttgacgatctcggggaatggggcagctccgagagcgggcagctggggagcagagaggacggtggcagggccgagagcaaggacgaggcacatgaggccggagaagttgatagtagtggagaccattgttgcggtatgattctttttgttgttgttttggaagaggaaagtggttgattaaaggcgagaactgaaagttgatgaaagagagttgcgaaagagagatgagggaatgactgtttagaaactgtgatgcttgatgaagaacagaagaggaggcgtgaacaatgatccttatgtacttttcgacatccatataaagtgtacactcgaacagtatggtaaggagagccaaggctatccaggaccagggagatcgctgcaaggtacgaacttccttggccttaatcttagaaaagccacaaggtcggtgatctgcaaggcacaaagtcaacggaagctaccaagacaagagatcgtgagagacatcatgtctcaaaggatctgaaacaagtaattagcggaaattagggcatccgagcaacatggttcgatagtaaggagctgcagctctgttgagagactagatgtgcctgagcgagcagcgcaaagcttatgcacgagctctaactcgagcctctgagctattttagctcagctaggacagacagtattggcgggatcctgtatgggatgtagatgggctgctatgggagtacgaaaacacgtgccgaatggggaagaaaggttgtatggatgcaagggataatagccaataaggcacagagacactaagatccctctctgctagagactttccaaggagccaatcaggacattggattaagattgagtgcaaaaataacacgcaaggcactccaacacaggtgagttcaaatgcaacttgctagggctgttgcctgttgcctgtcaagtcaggtaaccccagaaacgaagactgaaagaaatccgaaataattgaaacaaatggggttgtattgcacatatcggcatagatcataagctcgtaaggtatttcgccagaagggagaaagaagctaagaaaagcacagcatcaaaaggatgctgctgagaagtatagaaaacatgaagaaatgcaaaatagacatagtaggagttcacacatagaacacaaagatccaagcatagatgggaaatatgtgcgtccttagacttgacccgggttcgatatcccgaatgcagtgccgaaattagttgattgcttgaacctgatttcaggctgttggtcttggtcagggaactcagattcagaatcagactcattaggatcagccgattcaaccgagcttcccaggatattttttgcttcaactaggagtttctgattcagttgatctaaaaacttggagtcatgctcctcatcattaatcaaaccgagaggccccttcaaaccggggtcatctggcacatccggaaagtaggagaccttattttcggagggttgatgaacttccgttgtcacgggcgcaagaggggcgtcctcaagctcgggagcaacctcgaggggagaccccggctgggtggaccgactatcatcggcgtcgatgatcgccatcggggtgtgacctgcatggcggagcaagttctcattgggcgggccaagctctgacagcttcagtctgagactagctcgatgttccataggaggccttgcagcggtggtaggggcaattccaggggaggttcccaggggcgatggggagggcggggtgatcactcgagctactacggcaggtggcagcgccgtggacttgagcgtgatgccgtccaaggttctgtcaagcttttcgatcggcaccggcagactcacagtcggtccagaagcgtctactggtcgcgaccggggcgagagggcccgatcaagggatggtggatccccactttcggaggttggcgatagatagctttggtctggcgattcatgatcgaagaacacccttgttggccgcgtgcctggactagtcccctcccacacctgcgctgcgaagccacttgtgttaaactgcggtattccacccgcaagcacatgtttgacggcttccgatcccaattggtttgttctgttcccgtgactcttcacgaacgcctccagctcggcgatttttgatcgcagcagcgcgcgctctttctcccacaaccgtcgttcctgtgcgaacaattctctctccgtctcgaaattcacccgttggctgtgaagaagcgatcgcgattggtcgatataggacgtctccatagcgaacgaattcaccaacaccgagtcttgcaatgcggtttggccgtagcctgaagggacatgaggaaacgtggctgaaacggattttgtgcgacgtagtggttcggtcggagagaagcgcacttctttgtagagactcccatggccgtctagtaatttggtcgacttcatgtctgaaatgtgggtttctctcggtgggcgcaaatccgcagataagggctctattagggataaacacgctagtagcgtgggatagtccagtgcccaacctgcagagcttcggctttccacgtcgagaccagtcgagttcctaaaagcggtcaatgagttcacgctccatctaatgggatttcatgcgaggttcccgatatggcacatgtcaagcctgcggtgaatggacactggttgggcaggtttgggatttgggtagcttttaggtatgaaggccccatatgagagggggagatgttagactagatcgtgaatatccacacagattctggggaaatgcagttacaggaaaggggcaaaagggaaacacctggccaagttccaaaaagcaatgtgaatggatgcatctgatcacattttatgacgtcaaaggggctggaataggcaatgtcattaataagatgatgtcgggtgagtcagaagatgatacattaagttgagagtatatcagagccatctatgtaagtgatatataacaggacaaccgggcaacaaacataatagatccgtctataagctgccatggaccaaattagtataaagaagaatgaaagaagaaaggagagtgtcgaaagcccgcccaacgccgtttgcgccaaagatgtgccacattagccattataatcagcgctcagacgtcatgacgcaggctaaaagatgcaaaaacaaaaggatatcaaaagacacaagttgtaaaaggagagggaaatccctcagagaacagacgaggtgggccgcagccggcttggcaccatttgtttcttgaaatccaaagaccaagcagaacaccccttaatagaccgatccgactgtctcatcggcgaccgactgcgccaaacaaactgctgcgcctcatccagcagatgctgatcgccattcggcaacggatagaagctgacatctttgcacaaagcgccaaagcgcgtcgcaaggtcgaataccccccgggccgtgagatcccgaccacccacgttcgcagacggataatagtagcgtggatcgagataaagcagcacgctattccacatcggaagcttctcggatagaagccgtcccgcggcctcgtattgttttagcgtgcgcttcggcacgccggtctgcgtgtgcacgaagaagaagatctcgaagccgacgctgcggatgcgggcgcgggcggttgcgctgagcgtgtccaggaactctgctaatcggtcgagattgaaggagttgcggaggaagagcgtgtgtgttgagtatagatagtcttcggcttcgtcgtggagttggcggttcaccgctaatagcttgcgcgcggtgccgtcttcgccaacccagtgaggactcattgagattgcgcggtattggccgcgagctgtgaaggtgttgccgtgatcggcgagcacgatcattggcttgctgactaggtaatcattgggtacgtctagtgcatattcgtagatcttgagccggagttcggctgggagttggaggagccgcgatggtgatgtcgatgttggagtcggagttggcctcatagctgcttagctagaagaaagaatgaatgtcgagcttcttgcgaaatgcggctgttgatccgatttaaaaggcagtggtaccactcgggtgtatacgtcgccaccgcgagaaatttttcgattcgtcggaaaaagtcaatgcggaataaaaatagaggtctgtactttggacacagtactcctagatggccttgcatcccgagaatgcaaagaatcagaccatgccgacctatgatacgaggtgccgagtatctgatcggcatctcgatgcctatagatatcgcagccaccacgtatacttcaccgcatgttacatcccgatcaagctacggagtacagcaatgagcttactaggatactctaggcgacttttcctgggtatgctttaccggattttgatatgataaccttggaactttggttgtatgagtcaaccaatgttgtccttagtgacggttttaggatccgatgttcggagtataaaacagtcatctgcctttcttacattccttcttgctttagacctgtgactagctctattcgatatgaggcaaggagaaacaacgccaagcaacgttgaggattttcccaacacacgtgcaatcgatttgctctaggcctcagtcctcctaggtatgtaagaagtagattgccatggacccatctctgcaacatgcaagtatgggtcgagtataggaaaagatgatgcaaagctatcattcattgtgccattctctaaaagtaattctctttgctctatattgtagcgaatgttcgtaccttccgaagctatacatatatacttcgtacagatgtcaccgcctagtgatatctggcgaatcttcccccaaggcttcatcgtctgtttcaaggctatgaagcacattaatagtcattctacaaccataaactttaaattagttaatgccggcgtccaagtctcattgccgactggatcgaaaacatatccgcaaggggccaatttaacggtatcagcagccatccaatcctaccagtcagttctactgccccttttctgtagcagactttgctagcgatggaaagagaaacagcatagctaacctgatacggaaagatggtgcgagcccaggcctatcaggctctttgggcaggaaaaaatgcccagcctatgtatgtaacccaagaactatagttaccagtagtcgattggatcatccacggccaagtaaaagccgagtctccaatctccaaaaattcaagatgcaatctatttgctatggaaaactgtccgaaaataggaataatgaagttcccggatcatcgctgtctatacacacccagtgaccaagctgcccgcagaacagccagaccccaagccatgccgatactatctcgtaagacattcaatttgctacccttaacctccctccacccgacaggaacctcggccacagggatccgagcgaactcagccagcatgagcatctcgacatcaaagatccagccctcggaatgcatgtacggcacgatgtaaggtagggcactgcgggagaacagcttgaacccgcactgcgtatccttgacagtagccgttttaggaggcgtcataagccacaggatcaaatggaacgagtgcatcaagaagtttcgaagcttggatcgctatcgagcagtcagtaatcaatcgcaagcctcccacaacccacaacccagatatcaaatccccataccttaaccacagcctcactcccaaccatatgcgcccgcgacccaacagcaaccgcgcgccccttcgcatcctccacatcccgacaagccccaacaagcttccccagatccccgaatttgctcgccccatccgcatccgcaaagacaacatactgcccccggacatggcgcataccgtgcgtgaccgcgccgcccttgccgcggttatgcgtcaaggtcacgacgcggatcgtgccagacgggatatgaacgccctccgcagcctgcggcgtccacggacccgcgtgtcccttggggtggagagagagctggtggtcgcgcgcgaaccggaatgccacttcctccgtgcggtctgtggacccgtccgagacaaggatgatctcccagccgcggtctgaggccgggcccgcggcgtcgctggtggtatccgcgttcggcttgcgtttgcgcattgagcgcgtctccattgtaactggggtgctggccctggcgagggcgctggccgtgtccccgtacatctgctccaggtagttgacggcttcctccagcatgccggttaaccggtcttcctcgttgtaggctggtactacgacggacatgaatagctcggccggtgcgattgtgtggggtgtgctctttttggtttggctttcgagccagcagggtaggggttcggggtctgtcacggatccatctttggcgagggttctatacttcttttcttctgggagaggttttcgagggactggcgcaacgaaaaatataaataatgagaactatgcgatagcaagctggtcagtaactttcaattgggctgcgcgtgtctggagtgcctccgcgcgatctggtacaagcggagttgggtaaacgtggactcaccaggacaaatagtcctagcaaagtaactagggcagcgacgagtaagacctggactgggatttccaccgcagtattgacgcattggcgacagacctcgccccaagctgccgccattgtagagagtgacgaattggacgtcagatgcggagacggaagaggtgcggatagggagggtgagtgatgcccgaagggagaaggcaagcacttaggtcggagagagaaagtgtttattcatagaggtaaagcagaatgatcctcgccatttgaaaagagagagggcgcagaagggaggggaggaatgttgtaagtcgatagtcgccagcttgtccttttatcagcagctcaacgcgcaagccaatagatccacatctaggagccacgctgcgtagacgctctatttttacagtgttttacttattatagcttctattataatctatttttcatattctgttacggttcgcgtatattgtagcgcatttacctctttatacgcgtttaccgcgaatcgcatggaccggccagcttgtagaatggacattggctcataagagctgcttcctgctctatcacattgctcttttcttctaatatgcgcctcgtgatgttctccaatgggcaaagctagaggactgtctgtagcaaaagaaattgacccggagagaacatgatcatggtgcccgaacactctccggccatgcctatacaccctccataaaacagcgtgagtaatgagacaggggagaaggacaaggggattgacactgaaagcttccaattttaattcaaatacttttgttctctcatctcatttttccttcttcctctcactttgcctccctagtctttgcgggagtactctttgattctcgcaacaatcgttcgcccaactggcaagtttgaaacaacgcatcgagaagccagggatgacttcttgctaatagctctgaatgtgctccttctggatagaagaagtccgcagtaacccgagtccagaagggatcgaagcaggcctcttggcttctaacaagaccaatccaactgcggtggaaacagactagaaatgctggccagagttggcgaatagtatggaatcagacggacggaagagcattccggggcagggatcctttccataaatatggcaatatatgcgacaatccttggacggtccagtcattgcagagaggttcgtatggatgcaggccttccaggacagaaagacccgagttctgatatctgtcgtgaatgtggtctggcgactcatgaatttcctgtctggtaataacgcaagataatggtccctatctggcttcgtgtacggaaaggacagagcgaacgatctggaggcttgagcactccatttcgaacaagaaaaaaaaagaaactctcaggtttgaccagcgcggacccgtcaagacgcgcagccaacgtcgtaacggaacccgcagcagtcacccagccgcattttcaaacatcctgcatttcttgattggaagaaggtagctcaatacctagtgtattaggattgccataaacgtaagccggtgattctgccattgacgcaaattcctctgccaatcgggtgggtgtgaaccgtcgcgtctgatcgtatgtcatccagcgggtgaactagtatgatggtcagtttaactgtgctgataggaacaagggagacaaacagttgcgatccgcactccaagccaaagacatcggtgttttctgggaatgactgttgaaggttcttctgttgatggtctgttatcttctgtaagagccccatcgaagaacccttctgggtagtaaagccggctccatgcctgtcctctgatcaaaaagtcctctggtagctggtgcgtagttgaatcgtcaagaagcgggaatgattcgtcttcgatcttcgaaatgatcgtgtcagagccgaataaggtgtttagataatttgcaagcagggaccacggaactagcggttctagccgttgtatagcagctgggttgagtgtaagagaccacacaaatgccatagagatatgcacactcgggtagatgttgggatcaccgacttgcccgagcatcacaattaacgtgtgaaatgcgagagagctcgcccggaatgcaagctgagacgataggtcgctatatgtgtcgggaacgggtatgttcgcacccgatgcccacttcattgctgttaggcgttcttctgccgtaggattgcgcgacttcaatgtgaaatctttttccatcattccatttttgctcccatattgaagtattgcgcagatattgcaagacgtgagtaggacacctttctgcccgcgcacccggttaatttccttgcgtagaatagtaagaaaacccttctcccgagaaacgaattcctcaaccggagcttgcatgaaaagcgtaccgtgagtagtcacgaacgaggtaatcaaatcccctttttgagctggcatattcataagaggagtgaccagctgaatcatgctatcgagagcatttgggaaggcgcgcacgctgatcaatgctttcgtgtagtgaaaaaactgctgcagaatgtccgggcgagctagaatagcaagatggtgctgaatacggccattttccggacttccgtctgcgtcctggttataccaatacctcgatacccctgcccagagttcacggtccttcttgtcgaattcttccaccgccatgcggtaccgtgccaagtcacccaagcactcgacccaggtttttctaaagtctggcacactttcaaggagcagcgttatcatcgagtatgagagataaatgaagtcgagcatatactccatcgaatcggggagtttctggcgtaacagctctaggaatgaatgcacgccatagcgccacatgcgcgccggcatcgcgtacttctcagctagctctttaagaacaggaccagcagacgggtgccgggaggcgaggaaaaagtcatgatgttcgtagagtagtgttcggtgtagcgagacgagtgtctgccactgtccctgtgatagcttggccttcgattgcgcctgttgtctatcggtttcgatgcacttcttttccacattgacaacgccggtataaatcccccgcacttcgttaatcagttgctcctcggtgatggtgtgcgtctccagctgccgaaacattccatgaggttttgcttcctgagtgactgcctctcccatcttcacattttgattcattatttcgtcatttttcgtgtaccatgacttctgcgcctgcgcttgattttgcatggtctgggaaggattcttgatttcaacggcattttgactgcgcacagcaacgggtgttgaatgtgatctttgcaaatctggacgtgtcgcaaagccttcccgcgcactgatcttgatttttggatctgcggggtcatttataccgtgaggcacgccggcctttagctgctgagaagccggtcttcgagatgaacttatcgcaaagccttgagctaattgcgatttctcttcttgcctgggcacacggatctcaatttttgaatctgcggggttttcatttatgaagtgaggcacgccggcctttagccgctgagaagccgatcccgataaccgccgagactttctagagaccaaggagctgccccgacgacgagatttgccgacatgccctgcacacgggcaagtggggctcctgagagctcgcatgtcgtgactactacgtgtttccacagtgcaatcgtctcctaggacgccagtcgactttggtcgagcactggatatcggcgagctggccgagcagcagccatgggtacacatcgattcagagatcaaatcttccgacaatagtcttttcttagatcgcctgtataaacggttaaggataagcaacaaaggctggggtcgcaacatgcctacctaggtgacacgtcgctacggacaactctatctgagagtcttgtcttagcatccagctggctgtaaaaattgcgtctggttagtcttgcctccttacggcacagcttgtcgcccattttcacttaaggagaattagttgatcgtttgagccttgcgagtgggcaacgtacctgataagaagaagagatatcccaaatctcacatgttgtcttggagaccgggcgaatatatagaagaggcggagatatagaagagggttaaatagtctgtttgggttaaatcgaaatgtagtggcgtagtgggcgcctgggtgtgtgtcggcctgcgtgccgatcatcatacgcctatcattctcgtattttaccatacccaggtacgaactatcggttgcctaacgaattcattgcttctatccctttagtccgatctccatgctactgtatacccgcttctcgccaagcaacctaatccccgaatcccctgaaggagttagcctctcccctgccatgtcactgccttaatcgcgttaggggaagcagacaggtcatagccgccccaagcatcccagatctataacttcctctctttttatgtacgaatcaaatatcattgatctgcaagagcttacgaaatatatcttattcgaaacatttgactgcaatcaacagagttcaggtctacccgtaattgcccaacttgtctcccaatatgtcagatacggcatcttacgatttgggaaaccttcgcgcctgggagtgaacacggggtgcccttacagcgctaggacattgtctgctcggtcaccgctatttggctgaatttgaacacaccggttcttgaccaagcttgagcatagaccagggccttcagcccaagagcctttgtttagccttggtttaccctgggcactgggatgaccccggtcctttcgcattgagcactatagattacgttcctctttctcctagaatgaggcaattcttgcaccgggtcttttaagttattagtgtttagggctcatgtcacgctcttattaccggccttcgtattaatcattaatcatcaggtcgagattccttaaatatccggtgactggcaatcatgcaaccgctcacggaagccgacagaatatcggaccacacagccttgaattgttaaaacgcctaggtgatggctatacttagacggggttgaagctatggacaggggttatactgctacctaatccctatttatctccatcgatacggatacctaaccaggtcaagatacatagttcttagcctagaaacggctttatcactcacatccaacgtacactagctaccgggcctaatacaaatgtggataaaccgggcgtaaacactccgaaggctacaaaatactcaacgtcatccacctgtcattcaaatctctctacaactgtactttgaacctatcaacaccaaaacaagtggcttaggatgacgttagtccatttctgcgtttcaaaaatcttaggcagagctgcctaagcctatcgcgtaagcgcccgtaccgattggagggtgtttaaggtacctgtacctacttcgtatgaaaaacagcatgacctgcatatgtaggatgtaggatgtagtcagtttcaattctattaactcccatgcaagagatacctattccaatataatcaatcaacatgttgtccaatcccgtgccacccaataccaacccgggtcgcattttacagcgaggcaacttccgcgatccactaacccccgaacaaagggatcccgctcgttaattctacctcccttcgaggaaatcaacttcaacggaaccgctgcaagggagtggtgaggtgatattactgcaagccacacgggaggaagaaggcaggaaataccttgattcgtcgcccgtacctgccatcacccgggtgaagggctatttctcggtccggcttccctagtcgagacattctatgtacgtacccagttgacgccgacatttaaaatgttagtgtaaaaagcttgcatgggatatgctcgttgagctctagcgtttgaagtggggaagacgggctgcagatttcacccgggtgaaatagttactacgcgacttctagagtttcgggatctgcatggataaggggtgtgtgcttgtctaaaacctgggtttgatgttgcatgtcgcaccctgtgtatggcgccctgtgcatctgtggggttcgttgatcaggcaaagctcaatgggctcgggtcggttttgtgtaccttcatatcctggaggttctttttcttggagaatggtggatacaacctttggattatgcggcgaatttgtgtaactattgaactaggctttctttaagctctcatagccgggtcatgctatactatcactagtcattgctggtcagtttgcttttcttggacacaggcgattcaaggcaaccccacattttggagattgaagagcaggtctatggctatcggcggattcactctaggcagcgatgtagctatacatactgttgaccgctgctccaggctctgtcgggtgaaataatctctcagccacatgcaggtttctttgatagccaatctagtatattgaccaacgaaataacgaagaaatcacttcttaaaggctaaaaggccgagaatatgattctcaagtggtagacccaatacgaatatatattgcagaagataaaatttgtagacaaaattatgcaataaaagggggaactatataaattccgaactgatagctccaaagttatgaacggagttctatgattaattcataacataatcgaagcagcaatttcacaagagcaaaattaagtacatattcacaaggagctttagctacaatatatgcgatattcgaaatacattcaacgtgtagacacgaaaagaggtgaaatcaagactgaacgacgtcatcgaagcaaccttgaaaacaatgattcacacgtccactacgcgctgtatccaaaacacctaaccaagtctcacacataaaccaactcaattgacagcttaatattatctgacccgaattaatgaactccatccgccttgccgcgcgatacctcaaatcaacgcagcccatccccacacaccgaccaaccaccagcatcacacaagccacagcaaaaaccgccaaaatgtcaacattcacactccccggctcaaatctgaacgtgaatagcatcccagatctaagcgagaaagacctcctctcattcccagccttcaaaacctggataacaaccctccagcactctctcgcgcgacaagaacacccctcacacgagttccacagtgacccatacgtactgcgcaaaatcgacatccaagccgtcgaccgcttcggtggcgggcgattaggcttcgtcaaattgaaagcggatgtatcgaatagccagggcgagactctgccgggtagcgtatttctgcggggtggcagtgtcggcatgttggtgagtaaagttgtgttccatttctactcgataggaggttttttccttgatactctatttcgagatctagaagaaaaaaaaaaagaaaatattacgccctagccccaccattcgaaaatagatggcttgttctaattctatgcatagctcatcctccacccaaatgatataccaaacccgactgaaaaagataagcgcgttatcctgactatccagcctcgcattccagcgggctcgctgtcgttcgcggagatcccggctgggatgctcgatgatagtgggacgtttgctggcggggcggcgaaggagatccacgaagagactggcttgcgggtcgagcagggcgatttgatcgatatgacctcgctggcgctgcaggctgcgcaggaacctggctacggtgagcgcctgcaggctgcggtttatccgtctcctggcgggagtgatgagtttattccgttatttttgtgtcagaagtctatgccggtaaaggagattgaggggttgcaggggaagttgacggggttgcgggaatccggggagaagattacgcttaagattattcctttggcggatttgtggaaggaggggattagggatgggaagactttagctgcttgggctttgtatcaggggctgaagcaggaggggttgctttgagggaataaggcttggctttgctggtagatttgtatttcataggggtttgtttgtaccaatgtatgcaagctagtgagatatgaacaattactcgctcacaacttccatttcttcgccagttcaatgccctcagctagtgttccaatcctggcatcaatagcataaccttctttctcaagcttcttcaactcgtcgaacaacgacgtcaaaggaatagtaaagcattcaatgaactcgttatcctcgagctcaggcttcgggttcttgttctcgggaagagacatatcaacccggacgtggaccatatgcaggttggtattgcaaagtcctgggtctgatcatcacaaatgtttgtcagcttcagctttacaagtcaaataacctgccagaacaaaacaaagcccgtagccaccacgtaccgttaaacataaccggactagtctgctctgcaatgccaacataaccagtctcctccttaagttctcgaacagcacattgctcaggtgtctcgcccgcatcgatgagccccgcaggaacctcaatgacaattgcatcaatgggtgggcggtattgcttctgcagaagcagctcctcgccagaatctttgttcaaaatagcgacgatcccaacgccatcaagatcgagcccggcaggacgagtctaggaaaacgcggttagcatcaaatccgaaatctaaatttcaaaatggaggttctaatagattgttggagttgggtgaccaagatcgaccaatgggtccggtacacatcgcaaggcaaccggtcatgtggttttgtttgatacagagccaggcagcgcccgggtttatgtcacctgttgacgtcccgggactggggagccccactaatgctagcccccgtttcgtgatttagatgaggccggatcttagttgggtggcttggctcccgtaacagtcctgcaatcaggtggatccctacgataggtgtgacgcatataccccggacatctaccaacagcgcgcatagtacaataagcacagaacaagggataggtcttaccgtgcgctcagctgattcccatgttcgctcgacacccagcgggtcggtgtatgttgtcttaaccattcgagcccagcgggcttcgctggggtcctgtttggtggaatgtgtcagtcgtgcattggcccttttttggtgatatcctccgcgctctgtctatataatggacttgggatttgctgaagagacccaagggagattaggaaaacgtaccaatggtccccgcgaaatgagtttcgacttggcctgtacgcgagctgacattgtaacgagttggcagtggttcaggttgaaagagagattcaatccgatgtattccatatgtattagactgacgttgctcgatcgaccaatagagcgggggcggggttagcgcggggttagcccttatcttatcagtctatgactgcagtaaggtgtccggtacagaccacttccgcactatcaagatacttgctatttgctttgcttttatttcatgcagctgcatgttattcagcgcactgaataaaccccgtcctgacctcgatcagcattttggtactcatcgcaaaccccgtcctcaagcttcacattttctaatcatcccctataaactggcaaaattcggcctcttagctgctgtggctcgtccgtggtatatattttgacttcagcatggtagttctcaacacagatgagcctcaaagcaaatattttcaataccaactaacgtcacatgtaggcgtagctgtgccctgtcagggtccatgggtacatacataacctgaaagtacacattcttttttgaaatttaaaccgattcctattctcctaccaccaagcaatagcattgatagcgcttatcgcaatggtacccgaagtacaagatatcgccgctcttgagctgtacgaagccgtcggggaaggtcgcatcgaccgcgttgaatctcttctagcagccggcgtcgacccaaatgcacgattcgacaacctaggttccgttttcacaggagtcgccgaagactgggccagcgaagacaaaagtgccaggcctcctttgttcaaccccgaccagactgaacaaccttcccttcgccgagccacgggcgagtccgaaggttcatgcagctatctcgataagcccaaggccacgcgtcttatgaatgccctgctcaagcatggcgcagacccgtatgcgctatatcggcagccgatcctcaaatatcgatatgtgcgtctttaccccgggcaaacaagagacgaagaggtagatgacgaggcgacggaccttaatcagatatgcttcgcccgcaggggaatcatggaaaaagccctccgactggaacggaaacggcgcaatctcgagcaaggagtgtacgatcccaatcgggacgaattcataagcgatttcgaaggcagtctcgacgatgtcattgagtatctagatcttcctatcaattacggcgtgcgcagtgttatccatgcactactcgagggcggcatgttcgtccagcctatattcgacttcctaggggacacgctagatgtcgaacgacgagatccccagggtcggacgctatttcttgcggcgtgtcggagcagagttggtccagatgctgcgacaagtggtgtctatggcggtctcagcacaataaactacgacactggaatccacgagaacccctccccccaaccagagaatccatggagggagttcgaagccaagaactcgaaggcctgcactgggccaacgttcctctccttttccatcgcacgtggagccgatctactggccgttgacaattacgggaataacgccctccacctgctgtttacctatacagattgcgcttggataggtttaccaccgcctatcgatactacacttgcgcacctgatcgaaacctgccccagtcttataaaccagcctgacaaggctggtacataccctttacatctcgctatctggcaaatgaactccatcatgattccagcgcgaaacagtccggcatcaatctaccatttcgaaaccgcggtagacgcccttctcgctgcaaatgccgatactgcggtccgagacgggcgtggaaataccgtgcttcactatctggctgggagtagactgggagaaaaggatcgaatgggcgatgagcaaaggcggtttctgcggaggtttcttgaggacggtgttgaccccagagcacggaatgcggaaggcatgacggcactggagatcttctgcacggtcagctatgatgaatttggtgatgaggggttttatgaccggtattttgccattgggcaatatgttattggctagtttgaaaaggctggctacgacatccaggagacgaattcgaaagggcagacgctgttgcatttggttgctgggctcaccgcacctgaggggatgtcttgggctgcgtggccttggtttcaactcctccggtctaagggacttgatcctatggcgaaagacggggaagggaagactccgatcgacattgcggaggagaacgagagtatcaatgtttggttgcaggaggaacgtgagtccatggccgcatagccgccagtgatatagagtactcttttacgtgtctgcaaggtcgctagaatataattccagcaccagcgaaccctttataatggtattaaaacttcaaataactttaaatataaaataaacacccgaataaccaataaaaaggtatagttaatggtatctcattgcgcataaaaacctggttataaagacggagatactaaagaataatgcaccaggcaataagaaagtagcaatgaccggacacagtccagtctcaggcaagagttgtcactctgtgtcaaaagatatagaaacaccttttgataacggaaagtggcaacagaaaagagtccacgatactggagtggcgtgaaaccaaagaaagaatagaagaaaaagctccatagcggtctacgctcgctctcataacatcgtgggcataggcatcatcagcgagagtgtctttaaagggtcgactggacatcgacggagacatcattctcgatttccttcatacacttctcaaactctgaccaatgatacatgacgctcttcgcgccaatgtcagtcagggccttcgccattgccttctgcgtatcttcgccattgtagctgccaacgtacgcaatcacgggaataccggcacgaaccgcagaaagagcaccagacttgctgtcctcgatggcgacagtctcggaagcacgcttgccgacctgctcgagagcatacaggtagatagcggggtcgggcttggaggtcggctttggcagggagctggcggcgctgaagaccttgttctcgtcaaagaacttgtcctgaccgactttccggatggaagcgagcacgcggcgcaacgcagacgaggagacgacggcaagaccgtacttcttcgcggcgaaaaccttttccagctcctcggtggcaccgatgcagcttttagccttggcgttcaacttggcaatgacttggtcctcttctctgatgacgtattcttcaagcttgtcctcgtcgatctggaagtcatatttctgctgtagagagatcagcatgccgcggaagttctggccgacaaagtctttgatgagttggtcgccggtgtaacggtcggggatgttgttggcctccaggatctcattggccagatcggcacaagcctcgaaggctagctcctctgagaggaccagcgtgttgtcgcaatcgaagaagatttccgtgatctgcagtgcccgttagtgtgggtctctaatgggatagatcgtgatcgtaccttagtcatgatgaaagtgcggataatagatccgagtgtttgtttatttgtttattgagaggggatgtgagtagaagggcaattgggaagtgtggtatgacctagaagagtgggagttggagagttcgagatggagagaagaggaatgccagaaggtacgagaatcggcgattggggtatttaagtcgaggcaggacccccaagacatgacgccgcaatcacaatatcccaggggaaaccgggccagggcgggaggggctggccattgacgtggggcaggaggtactggatactttacattaggcgtgttttgttagtaaatgcaagtactagtacctcaaacctggggagacggccagatgttcagccaataaaaagcacggacccacgcaggactagtcttcttccggtatagcgtctttttctactccgggcaggtgcgatggtttcatcgcgttttcgcgctttttctcaccggcgcctttccttcgccttcgacgttgggatgtttgaaacctgccttgatagtcccgtgatattatttcattctttatgactactagagtcaagtgactttgaatatgcaagtaaccctcacctgatctctaaactacaacactgcaacatgactggatacaactacggagtatacatcagcctaccaggtccaaactcatgcacggtcatgcctccgtcttctcaccgtctacccactgttctccgaggagaggccaaaccccaattcgcaaggaaagccgggacacggaatgattgagaagtatacacaagcatgtaggcccgacgctccatccgttggtccatatttccgtgtcctctccagtcacttgcgcggtcagataatatcaagtacggagtatgcacttggacgttcggagcatgcttggcggggactagagaaccccgatgttagccttacctcggtacggagtacggagtgcatatagtgctattccagttccggtgagccatgagcgatctgacatatacctcattctattatcgccatggtagtgcttgagttgtgcccaaccttggaggcatccatggatgtactccggagcgcgacagtccggaagctagtatagactttctgcatagtagaatttacgcagcaattatttcaaccaatagacatggccacatttacaccaggaaccaggtagcaccactgtggtatatacatcgcacgaacccgggtccacctcttttatacaatcatcatgattggccagactcaaattccaaccctgctaattccacaacggcttcccttcacattcgacccgaccaaaaataaaacatcgcagcataacgcctgatcaatcaaaagcaatctaaccagcacgacccagcagatctcgggcgaaatcgccattggcacagcccgcacccgaaacgtctctagtacaaccccggagactggtcactgagtacgacctagccatatttgcattcaaatatacttggcaataaagtccagccaaaagaaagccaagcatggggtcgtcctcggatactttcccgaccctggagtcccttcatttcccgtcggcgcagctgtcaatctcccagacgctttcgtcgctgcgtcgatcggcgctgtccgtcgccaaccggctcgagtctatcgagaccgatgccgcctttgcgcaggacgtcgcggaccaatatggcttaccgctcgttgcgaatgagcgctgcggaagctggtatatcccgccgacggccaaggctggcagtgcttattttaaaagcaccgatggccataccggtcagtgggattttagctttcgtaggctgaacttgcagttgctttcgttggctagggatcatggggggtaagtctaacttattttgcactgtcgtcttttgcttgtggatttacatatgtgttggagtgccttttgacccaagtataaactatgggaacaactccatcactacacgatcatcctaagacatgaaaagaacgagaaaaaactgactgtatttcctttccgctgcagctgtgtaattgtggactcaactcgccgaggaaaatgtgtgtaccacctctacctttcccttcccttacccatctagtcaccatgcatatcatgactacaaccaaggctcggtccccattaacccacccctagtaatgccagacgcactatcaaaaaccgtcccaatctggagcgccgtgctaaacagagccctattcccatccgcaaccgcataccacccagtccgccttccaccagattacctaggcgcatcagaagaagcacagatcgagaaccgaatcgacggattcgtgcattcactcaaggtacgcatgtgccattaacaatgactcccgcatacaacatacccttacaccgcacgcccctttctcatccatagctgatatttaactccagaacctgaaactcgatctagataatctacgccagcaactcggaaaaccaatccagatcgcctgggccaacaggacgtatttccacccgccggacctgcacacgagcgatgagtacaatctactcgtactgtgctccgcttcgaggcgcgtgcttggcgctgagatgtccgagggcggatacatccaaggcgcgggcgatgatagcgaggcgtgggcgtatgggctgacgccgccggtgttctgggccaaccaggctattttgaagagtacacctgaagacgaattgccagagcttattgaccggctggtggcggagcataagctgctggatgtggtgcaggatgcgacgcttgtttcgcctacgcgcaatttgtatattggatctggggccggggtggatgttgggggtcggtatgatattgttattgattgtaatgggagtgctgcggctgtggagggtaatgcgaaacggttgaatttgggctgtgattctgggaaattggggagtcgggatctacggaaatgtctggataaggtacgtgagtttattggcgctcgtcttggggaggatccgtcgctgtcggtgctggttacctgtgagagtgggaaggacctttcggctgggacgcttctggcgatcatttgtctcttttataacgatgagggtatgtatgcaatgccccagatggtctgggtgatgaattcaaacgctatgtggaagaaaaataactaatgttttcacaggcggcttcgatgcctcactgagcaagcgcgcgatcagcaagcagttcattcgacagcgtctagcctggctcgtgtcgtcgaagcatgacgtgaacccctctcgcgccacgcttcaatctgtcaatgctttcctgatgcagccgccggattattgacctcgagcaatgtgattacattgcgtcgcttggtcggatgattggtttcgaagcgggtcattaagaccatgccccagcgatcgctcattcgttgtccacggcctccacgatggcgccggcactgccctggtcgaaggaatccagcacagccatatcctccacgctgatgtcgaagtcgaacacatccgcattggacacgattcgttcggggttgtcggtcttgggcagaggcacccatcccttctgcatcgcatagcggatcaagacctgctgagtggacttgccgtatttctttgccacttcgactagcgtggggtcgttggctttatagtttcgcaccaggggcgaatatgcctcgaggataatgccgttcttctggcagtattcgccgatgacgcgctgctggcaccacgggtgaagctgcaagaatagaatagtcagtgacccgatcaaaccgagaactatctacgtagatagaaaagtaatagaagcagagcacgaacctcgagctgatcaacgtgaggcgggaacacctgggcatatgagcgcatctcctcgatgtgccccacaccgaagttgctaacaccgatactcttcgtcttgcccgccgcgtatagcttctcaagcgcctgccacaagacctttcgcccagcagagcccgagctggaggagtgaattaagaacaaatcgacatatccgtcggcgccgccgatcttgtgcacagaagccagcaatttatcgtaagtagcctcgaccgaggctgcggggctgaggatcttggtcgtgacgaagatctggtctctggggacgctagtggtgcgaagtgcctcgccgacttcggcctcgttggcgtaaaactgtgctgtgtcgatgtgtcggtagcctgcttccaatgccttcaggcaggactgcacacactggtttggcggggagcggtagacgccgaaaccgaggcgcgggatgccgacgctcgacttcgggagggggagaagatcagtgatcttgaaggaggcggacatcttggagatagtcagggatattgttgtttgcgaaagaaaattagttgagagtgagtatttcaagagaatcatctcctggccccgctttgcgaaaatgaggtcattccggatgactaaacgagtaaactcaaaatacgacaataactatgatagggtatgcgcaatattaagtccaattgaattccaatctacttggctatcctgagaatctctaatatatctgttcactcatattcactgtcaatagcctagtaatgtaaacacttgtgcctgcattgtacctggccaaagaattgcgtgatactatttgaccttacgcttgtttttatacagctattgcgccatcgaggaacattgcggggctgccgaacaatttagagtgttttgataagaatcagtactctcggtgtctttgtcagttctagtagatccgtctacttggttggcttctctaaccgccagtgcgttgtagttatgggattttgcctacaggatggttgtaatatatatcacaccaattcaaaggctattattgtacataggaatatcctcttgtgattttgccaccttcctttccgttttaagaactactatagataggaaggcataacctaaccgaggaaacaaaatataaacacctcctccctcttcctatgtacacataagataacaattctccgctcatgaacaatacccctagatctggtttcaagctcatatagcaaatatcagtgttcatacaggaaattatgactacgttccgctagatgcctgaatattcgagcccaacccccactgcgggctaggcggtattgagccggtgacaagccaatttaacaagcttatggcagacgggaaaaatccttatgttgtcttgttaatgccccatattcggtgctattcggtgaattctgtcatatatcatgccctctgcttccatggtttcatcttacactaagtcacatatattccccccaaagtaccgacacaaatgactccttgcagctgagacccggtaaatgaacctctgcaaagactccgtgttggtagtatgagaatgcggtactggcaagattagcagcgttctgtgagctgatatgagccactttaccatggtaatattctgggcacaatgatcttctattatcatggcttttgggtttgtacagacaaagaactagagcaatccatgagtggaacacatgtgttatgacagatagacccactcgctctctttaaggtatggcccaaaattgccgaaataaccaatgagtaaacgctggaaataccaatctgaattcggagatccttctatataacgaaccgcatcccgaaaatcaccgagcctcatgcgacgacggccacgggcatagtccatatcagggcttgatagcttgaatgtggagaaaataaaaaggaagtcaagttcgagagtggtgggagagctcataatatgtcctagaactaggaagctatatgactacacatggtggcgagcgaggattataccagtagccctcctctcgctgatatcagaagaaacaaacatcatgcctcacaccaaagaaaccggaaataagagatgccattcctattcttctcatcacgttacccatttcattaagtgagccctcgtcgttgtttgtcttatttgtgaatatgtagtggcacaaaccgaccgcccttaggatagctataagaaggcagccctgcccccagaccttcctcttcttttcttcttcttcagctctctttgcctctggcttagatttggtgtagtatctgttctggtcagtttaatcgctgatagtcctgcattgcaggtcatttctgattattctaatatttggacttcgcgacttggtctctgtgcttgcgcatgcctcgttgcactgtgtcattgggcttacactacccccgatcgacgcgaactccttttcatcaactgttcggcttgtctgggcgctcggagaagatttttgcttaggctctatgttcttatcagtggttgctttgtttacattgttgattaatataggtcaataatacttatggagttcctattacatatgtctattagctctgtctttgtcgtaacttactctcatctcagaactggggttgggggaaaagtaaccgtttttatatgagtgccttccttagtagaaaaccatccttgggccttccactttaagagtatattaagcttcatatgagcttcatgtgagcttgaagtgagcctggagttgtttccacgccgagatctttctgttaagttacagtaagacagtttcatttgcggggaagttgtggggaaagctgtgggcgaagttctgggggaagctttaaggatagacacgggatctctctccatagacttggctaagcctcaatgagtccatggtctttatatcctccgccccacgctggagggtcacgcgtagtacctacgagggcctgtgatattaatctcgtatcgtaacctactattttcttctcggtctctgcaaccttgaccccgcactctcgctcaggacatatccgaaagtgtatccggcttcggcgattctacggcatgccctggctatagggcatagagtaagatgatattgccgacagtagagctatataaaagccgcagctaatagaactcttccctattaggttggcgaaggcatttgttcactaactaatcgacaatatggcacagcgattctggagttttcgtggttctaaattggttctggcaatttggattgaagcatgcttcggggtcatgacctttggctacaacatgggagctgctggcgccgtcctcagcaacgcttccttcaacgatcaattccctcggatcaatacggtgactactactggcaccgaaagacaaaagaattctacaattcaaggcaagtcaccgttgatatgaagtaatggatattccctaacaatcacgcatttcaataggcactgtcgttgctatgtacgcgctctttggaatgttcggctcagtagcctgtatcttccttggtgacctcttgggccgccgtaaaaccattttcattgccggcatagtcaacgggattggcaccatcattcaatccactgccttttctctaggccaattgatcgtgggccgcatcatacttggattaggaactggcggaatcatagctacggtttcactttggcaatcagaagtttcgaaagccgagaatcgcggtagccatgtctccgcgtttggtgtcttcactggatctggcctttcgctttcgctgtggacgggcttagggatgtcgttcacgcagcccaattcagtgtcgtggcgcttcgtcctagtgctaagccttttattctcgagcttgctcagtctcttcatctttgcattaccagaaagtcctcgctggctatgcaaaaagggcaagtgggaagaggctcgggaaatcttgaatcttttgcataatgaggatcccgacttcgaggaaactaccaaacagcccgggggaacaaccagnnnnnnnnnnnnnnnnnnnnnnnnnnnnnnnnnnnnnnnnnnnnnnnnnnnnnnnnnnnnnnnnnnnnnnnnnnnnnnnnnnnnnnnnnnnnnnnnnnnnnnnnnnnnnnnnnnnnnnnnnnnnnnnnnnnnnnnnnnnnnnnnnnnnnnnnnnnnnnngaggatatccggatatcgctcgagcgggctggaaatgccagtatctttacaatgttcaaaatggggccacaacggagccttcatcgggtcatcctcgctgccattcctcaaatgtttctacaaatgagcggcatcaacgttattgcccaatatactcctgtcgtcttcgagcagtttttaggctttgacgcatttgattctggggtcctggctgcagcttcccagttcgcagttatcctcggtgccatctgctgctcctggacagtcgatcgagtcggccggcggaaactcatgctgatcagtgcgactatgatgtccatatgcttcgcctgtctatctggtctattggctcatccagaaaaccgtaacgggatcaaggcagctgccttttttatatatttctatttattcgtctatgtccttgggttcctcgggattccattcctctacgcaagtgaggtcgcggtgactcagttccgagcaccaacaactgggctgtctactgctgtatcctggctattcaacttcattgtcgccgaagtgacaccagtgggattcgccaatattggctggaaatatttcctggtgtactgttgtatcaatgcgctatgcgtgccgacgatctatttcttcttccccgaaacagctggacgttcactagaggaaattgatgagattttcctagcgtcaaattcaatatttgacaccgttaatgtggcaaaaggattaccgaagcacgaacatcgtgagttatatgcggaggaagaaggcaaagaatcttccagtcaagttgctcatattgacgatatgggaagaagagatgaagttgcataactgaatatgcggctttcttgtgttctgactcacaatgattcaattatagtacttgaaatacatgctcttttataggcaaagcgtaggaagcatcccatttcagttagtactcgacaaatgcaaggagctcgtaaccgatgtgacctagacattctgaacaaaaatagagaactaatgtctggcaacatgaaatagaggattgcccctctttagcccgatattcgaaaccgacctacgcgacaattgctttcattttgtgtgaagggaatgcgaatagctgggtaaggggtgttatcagtcgcaatctatgcacgaacatgtacatatcaaagcgcctactgggcatatcagtgcccggcggcggtaaaatagacatctgaaacgtgatatgaagagtaggccaattaaaacttcacatatccagaagtaccaatccattctaataatattcatgtacaaatctcccgattcaagacacaggggttgtaaacaatgaggatctatacttagaagtggatccacaaggaatgcatctgcaaattgtcacttgacaattttctcaacttcaagtttcaacaatttttttttcttcctttcaagcgctagttcgataaacacatttcttttctttcgcgttcaaatcaacaagaaacacggttgctcgggtgattttcagctccgacttgtgggacaaacacaacgacacccccacccctcgacattatttcaacaccccccctttgtgctccagtccaaatcggaaaccgagtctttcagcctctctgatcatcccagtcttttcttctcagccctagaccctgttcgctgtcacctcccgacatcattgccaatcggccctggatgtctcccgtgatcgaagatgttgacggttgagaagcagtggattaatgtgcagcaaaagaccttcactaaatggtacattctccactccgttgctctctggatgaacttcaactgacgagcaataggttgaatgacaagctaaagacccggcgcctgtccatcgaggacttggtcactgatctttccgatggcgtatgtcccgcctctcccccgctcactaatgtcgagttgctgatcgcatattaggtcattcttattcacctcctcgaaatccttggaggtgagtccctcggtcgatatgcctcgaaacccaaactgcgcgtgcaacgcttcgaaaatgtgaacaaaagtctcgatttcatcaaggggaggaggattcagatgacgaatattggagcagaggatatcgtcgatggcaatcaaaagattatcttgggtttgatctggactctgattttgcgctttaccatcagtgatatcaacgaggagggcatgaccgcgaaggagggattgctactctggtgtcaacgaaagacggcatgctacgacgatatagaggtccgagacttctcaaccagttggaacaacggcctagccttctgcgcgctcctcgatatccaccgaccagacttgattgactacgactcattagacaagagtgatcaccgtggaaatatgaagctggcctttgagatcgcaaccaacgaaatcggtatcccggacctgcttgatgtggacgatgtatgcgacgtacccagacctgacgatcgctccctcatgacatatatcgcctactggttccacgctttttcgcaattggagagagtcgagaatgctgggcgacgagtggagaagtttgtcaataacatgcatggcgcatgggacatgcagaactcatatgagcgccgagtgaaggaattattgcgactgatccgtgcccagcgcgatcactggaagaccgcctcattcgcgggaacatacaaagatgccaaagaacaatcatatcagttctcgctctacaaacggaacgagaaacgccaatgggtagctgagaaatccgacctagctgctctactgggaaatatcaaaaccaagttgggtacatatcgactgcggccgtatgacccaccacaagaactgagtccagaaaattgcgacaaagagtgggagatcctaacccgggaggagcatgaacgcagtcaacttataaacgaaacaatccgtgacattaagaacaagctacgccgctcctttgccgacaaggcaaatgactttgcattgaccctgaagaccttatcattggccatctctggactagatggtgatgtcgaggaccagcttgatcatgttaaaaagctaaatggcaacttgccgcccctggacgcctttctcgatgctattgcagaattggaccaacagtgcgcggaggccaatattgaagaaaacgacttcaccacatacaccctggacgagcttgcgtatgaattgagtcttgtcaaatccagcatttcaaagaagctgtctttccttgacaaccagatagttgctcgcaatatgacgaatctgacacctatccaattggaagagtttgaatcggtattccgccatttcgatcgcgactcttccaacacactccatgagctggagttctccgcagcactggccagtctgggactggtctatgacgaggacgagatgcaccaggtcttcgtggaggtctgtggagcccaccgactgtcacagaatgccggagtcagcttcgagcagtttattcgctttatggtcagcgtgacagaggatcagaatactgccgaacaggtcttccagagtttcagggaagttgccgatggcaaggtaagtgaagcgtttcttttaatctgacaaatcattgggcgacagtcacttacttctattacagccctatgtcacagagctggacctccgacactctctcattccagatgaagttattgagcatttggttaagacgatgcccgcacacgatggccccgatctactcgaggaccgggagttggccaagtacgactacattagcttcatggagaaaatgcgagaagtgaacaggaataatgagagtgagagtgagcaataaaggtatcattgaggttgatatttgcgcagcattactggtggttatgggggatttgcactgacttgttgctgctgtgtttctggtgttttcagcgacgattctcatgttttgaacttctttctggttcgtcttgcattctggggttcggtggttgttcctctttagcatgtatgtatgtattgtgttgatgtatgccttgctgtttgtaatgatcaggataccatgtgaacattttcaattatcagaccatcggtagacgtgggcaagcgaggatggccaagagactctaatatgacattgaatcaccaattcttcaccccaatcgaatctttgaagctattctagtccgatctatagatgtatgaggtggatcattaccgtattagtaaaggatatatcatgtgacagcccccagatcatcgcagctgatgatgagtctgcgactaattgtaacccttgacacgtcccactcctttcgatctttttcactcaaacgctggtcataggtgaatttcttgatcgagcgctctctcacgcatattatctcctccctcaatcccatccctcaaccataaattccaagatggaccgcagcttggacgaaatcatcgctgaagacacggtaaggctccagcgactaatgaaaccaccaaaacgtgcaacttactcattcaattgcagcgaaaccctggtcgtacttcaggcggtggtggtggttctcgtcgtcacaataactccggccgtcgtcacgagcgcgatggcgtcagaaaggtacagcttgactagaaaccgaggctttcttctggagtcccatttgcatagcatcgaagctaacatcacactcggtgtccaggtccgccctccttttcctcctctgcgaattctctccttgctccgtgacaatcgtagccagtcccctggatcgttggagactcgccaacgaccacgccacggcaaagacatggaaaagaactttgcacgatatctcatctgacttggagctaacgctaagttccttcgataataacagccatacacttcagaccgtgtcgatcttaacctgtgattatacctcctatctactacggtgtgggtgatactgacgggtttctggttatagagactgggtgcacgacaaattcgacgacgaccgatgtatgtggctttcccgtactttgctgggacctatctaacagcattcctctccagcccgcccgtcccgtggaggccgcagaggccgcgacggacatgattccgatcggtaggcgcctccttcagccttaaattttaagcttgtctgacagcgctaattgaattcttagctctagctcactgaccaaggttcgcgtggataatctccactacgacattactgaaagcgatcttgaagtacgtttcaatcatactcaaaccatcacagaataacaccctaacaaaccccctcgctgaacaggatctcttcggccgaattggacccgtctctgaacttactgtctcttacgaccgcgctggacgctccgagggagttgctttcgtcacatatgcccgcctgaaggatgcacacctctccattcaggagtacgacggagccaacgctaagggccagcccattcgtctttctctcgtccccggccgccgtgaacgtaaccccctcgagtccgcacagcgccctaggtccagccttttggaccgcgtagagcgcccccgcgacgaccgtagcatgagccccgaggacagcgaccgacgccgccgtggcggtcgtgctcatcgcagcgacgtcactaagcccgccccagacaacatcgaccgttacgttcccgggcaacgctccagccagcgctctcccaaccgccgcggcggaggcagacgtggtggtggccgcgacaaccgttcccaacagactgaaggatccaaccgccgatccaatgcccgtccgcgcaagactcaggaggagttggaccaggagatggaagattactggggtagtgccaacaacggcggtggtgaagctgctgcacccgctcaggacgcccctcagcagactgctccggcccctagcgcacccgctgccgacgatgatatcgatatgattgagtaatacctcacggtcactcgaactacaataaactcgcttgtctttcgcatttaagattttgggacctctatccttgcttttggacttttctatgaattcggaccaccttggcctttttccaactcttctcttctctctttccatcgctgaggcttttcagcatgagggctgaaactctgtactttacctcaaccaccaaattgtaactcggtctatttcacacattcggctttctactgctttggtttactcttgatgaaccattatccttgcccttcctctcgttgcatccacactggcgaactgggagctcattatatagttttttggggtttttttttgcattgttcggtgtcttcgttcttgtctttatatagtctagtcgtgggtaaaacccgactcgtgtacgtcaaaagtctgcatataaagagcaggaggctgttcgcaatcaatggatgatgccaagatacaattcgatagagcataaatccaatcaaggccgccgccaattataaagagaacaaagaccgcaaacgataaaaacagaagatatggtattcttccgtaaagtcttctacattgtaacaattatgagaagcaagttcacttccacagcccatagggttcgcggcatgctttccataacttgatagtaccgtcttcactgccagtgccgtagagcttgccatcaggggagaagctgacagaccagataggaccatggtgacccttttgaacctctgcaaaaaaagttagctcggatttaacaagcataggaagcaaaacatacccagctcctcatccgtgttcaaatcataaactcttgcccaggtatcattcgcactgcccgtcaccagacgaccagactcgctattaacggcagcactagcaacatcatagtcataatccgcctttttcagcaaccgaccaggctgcacgccatcaaagagatagacactcttcccagcagcgacagtcaaaatccccgcatcattaggtctcgtcgccagactattcagctcgcaagagccaatcgtgccatcaaccgcatactcaacgatcgggtcacgcgagcgcagatcccaccagcggatcttgcggtcttccgccgcagtagtgatgacattgtagtcctggttccagacgatagacttgatcgtcccgccgtgcacgccggcgccgatctcgtagctcgccacgccattctcggtggccggagaggccgaggatgggggaggcggtgttgagcccgtgctggaactgccgccccgcgttagatcgaagattcgtagcttcttctctgcgccgcctgtcgcgagcacttgcgggttcgcttggattgggaatgctactgcacgcacgatgtgtgcgtgttgcagtgtgtgtaggcattcgcctgtgtaggtgtcccagaccttactgttttgggggttggggttagtttattggtgtgggaggtgggttggggggattttgcttacgctgagaaatcggcggctgctgttgctgagatggcggcgtcggcggagagccttgcttgccatacggcacctttgtggccgaggaatgttccaatcctgggtttgatgttagtgggtgcttcacgggtttggtttcatttgccgtaccagtctcccgttatgccatcgcggagcatggggttattatctttagtcggttagtgactatccggtaactggtgagaatcattgctttttcttacctttgcatgaagagataaagtaatattgctcgtcttcgacggtggaagagaagctcagatgcgtcaccggacgagaatgcccgtggcaagtcagagggactaccttggggatatctgttgaagacctatcagtaaacatatcaagacggtgattttctattccattctacacaaatcactcaccggcagtcattttgtcggtgttgaaggaagttccgaggtttcagtgattttgatgttaggtattagaaagacaatcagatcagcaaagtgctatgtgcccaaccgagagcccacgagttgatatcaagatgaaaatctaggaagcagaccgagagagagttcaatatgtctaaggaaggtacataagaaattcgtcagtgtcgtcaagtcatcaaacagatatgtggggttcgaggaagagccgatgacaaaggatcgaaagtggattggacaagaatttttccaaccagacacctgaaaaggagagaaggcctctgggaatacgaaactcctttggggtgtagatgggatatcgaatttcaatttcaaacaataacgggcagccctggagatcacctattaggtaaggcatgcgctaatctaattcgggtagaatctaggcacgtgatatgctattgtatatggtcgcgacagttgacggcaagttattctaattagacattgacagacatctaaaaggagacaggaaaaaatgtagcaaagcatctaaaagatacttgaaaagatacttgaaaagattactctacataacaatgacagtgaatgagaggccagaaaaggccgcctttctctccactttaacttttaagcaaggactgttcaatggagaaacagtgcagttggttcaaatacctagatagatagaaagagaagaagcaagcaagcatgtgtcaacgatatgtaaagtcatatgacagccaatcatgcagatcgtggcaaggaaaagaaaagaacaaggtaagcacaattggcccagcagaaatccataggaagttaatgatccatgaagtcacatggtagacagtcatgctgattgcgacaagtatgtctgcaaaggcaggagtcggaagaattactcaacagagcgatctaggtcttcatcgctcaaatacccacgccgaagccttgtgggcgacatggattggctcgctctggggggcttgttttcgccggccattctgacaggcgaaagtgagagagtcggcggcttgttttcgcccaattttctgacgggagggggagagcgagtcggcgcgctaggaagcctggattcgcacaactttcttgccggtgcgggagaaagagttggcacactgggaggcttactttgaggcgagtctgtttcgggcgagggagatggacgggataaccggatgggtattctccgttggaaactcggtgctacttcgaccggagctcacgatcccgaagggacacaaactgaatcatcatcggagtcaatctcactctcgtcatcctcggcggctccgcgcatcgctgcaatccgatgtagaatccactgcaactccaacaactccatcgacggtagcggtttactctcaggatcatcggtctccaaggtcctcgtctcaccgtgaataaggcaaatattttcgcctgggctttccgtaaagctgttgatatcatgggggaacgggtgctgcatcgtctcgatactgtcagaagctttcctcgtgattttcccaggagcagggagccagtggaaggcaacttccatcgatgtcttcttcgtgttaattgagataggacgaagagcataaagagtattatcccagtaggtatggactagggccataaaggtgatgaggttctgcactcgctcagtatccactttgccatcattatcatcgatagtcattatttccgttttccacttcatcactctgtccacgccccagaatccttctaagatggaccattctatttctcgagagctattgttcagcttgaatgggaggatatgggatacatgcagcccatgtataccaaacttggtaagaacacatgcattcccatcgcgagtcaaggcctaaagattcgaagttagcattatatctgatatatccttttttccgcttaacatacggcatccctaactgctttaccacgtggaaaaactccacgtgtagcttgttccgacgaacccattggttcctcaccagacatactcgcaggcgggccctttaggcgcttcccaggagacgaggattcgtctacgggcacatcgtcggcctcgcgcttttgcccctttgctggtttctctggtttctctggtttaggctgtttcctgcccgcccctattactaatcgaatggccagtttagtattgtagaagtcgtcttcgatatacttacactgcccaggcacgtcaatgtaatggggcaaaaattgagtctttatagctgtcttcatatccttatcaggattttctgtcgcaaactatctgagtctatcgatatcgctaaaccataacatgaagaacatatggcgagtcattcggcgcaggaaagggtagagacgtatcatcgtctcgactaggcttcggcgttcaggatcttgaaattcatcaaaaatagtgactgtatcatattttggctcagttggttgatccatgatggacaaaaaaaaagattctaagatgatggcaacgatatacttgatactgttgcgtggttggcggaaaggaagaaaatagtgggactgttacatctccgccaccagatcggtaaggcggtactggaagtccaacaacaacaacgggaagcaagcaggcaggcaggcaagtaaggcgtcagctagataattaagatggggagaaggaaagaagaagcaagtgcaaagtggaaggcagccagttgatatagctgatcaatttgcaaacgttgcaaaaaatctaatagtaagcgagcaagcaaacgagcaagcaagcaaacgagcaagcaagcaaacatgaagcatatgatgaaggtttagtagatcttgacacaagcaggcaagcaaacaccaaacaatcgtgctctccaacaccaaataagcatgtactagtaatcccgacagcctaaggcctccgggatagtcgttacagagcgaagcgactggttctaacctctaaggttacgtaaggtctccctcttgagggctgacctctcgatatcggcgcctaaggcgtattagagcgtgaagggatatagaatatatcgtctagccggattagaggtagccagaaacggccagctttcacgccttccaagcaagtagtattaataccgtctgcatctttgcatctgctactatctgctgtttgtttcattgaattgtttgctagatagctagatagctaagcaagatgctcgagctttacaattgcgtcttctttctttcatcatttttcttatttagtttagggtgttgatatgaccaccccccccccccccccccccccccccccccccccccccccccccccnnnnnnnnnnnnnnnnnnnnnnnnnnnnnnnnttttttttttaagtttggggttttgtataaccccccccccccccccccacccttggctctgactattgaatgataatgttgagatatatcaggctgtcagattggatagttaaaaacagtcccaaaaaatgctatggataacagtagccgcaactgtagtcagtggtattcagtaagtatttgacacctattccattttccacggcctaggaactttaagtcttacttcaaatgttacttctctttcaggttggaaggggatacgtgtgcccaagtatctctggctcagtctatgtctcttacagatttctatttcctcgatcttgacgatgcatattgcgtcaaggccgttggttcaatcactagctacccaacttacacggtgactggttatctgttggcatatgattgaagtgacaggagtattttgtatgagacaataaagttgaattctcctaatgagcgaagaataaaaattgtgagtcttgtaaccgagttgactaatgtagacaccaaatgccaagactcggaatgtagccgaaccgtggaacctgcaattgctccgctccttaaatccacttcgcttcccgaccccgactaactcagacaggtacaagtgttttagcctggaaacctgccgattcgtgaaactagagcgtttgagagaacaattttatctctaccttcaaaccctgcatctgtggaacctgtttacccgtggaccgtggtccgtacccaactccctaacataccgagctttctgtttttcttccctgtcacttcataacaagagcctgggacccttcatcccaaaagttaacagatccatgattaccagaagagctcttgaacttcatgttttcctcgcatctacagccaatacgccctttattcccgcccgggtatccctgggttctctactctcatcaataacacttcacgtacttcacgtctcgctaagtcatcgccactgtatctcagtaacacaactaccttttcaagaacagtgtttactccttcgaaacgtgatcccaaaatgaaatccgattcgaatgaggccgataggcttgaggcgattcttaaaaaagataacttcacgatatagggctttgtgatttaccactgcacgtaccaagatgatgccgagtgggagaaatttatgaaccgcttcccaagcgcagttccagagtacctagagttctatagtggtcttaatctcctcaatacatttgccccgacggtcttccaagacccctcgttcaaggctgcgacggtagtcactctccgcgagcactttaacaagtgggcaaagactataaggaaagaggaacagggtgttagtgaagactactatacccgtacagggcgctatcgatgactggcagtcgtattatatgcgatcgcctggggttgcagctatttcttgatctctagtctcgaagtcttgctggagatggggattgttctgcatctttaagtccccgtagctccttgtatatttccgatataactcatacatctgaatgaaaactacaattcatgaaaagggccaccggccccgaggtacatattttaactctttttttaagatcgacctaacatctcacaagtatgacgtgttagtcaatctcattcgcatcatcctcggctccgtgcatccctgcaatgcgatgtagaatccactgtaactctaataactccatcgatggtagtggatgctccgctgcaccaacaaatttggtgcagtgaaggggagcgacgtatcatcaactcgaccatgcttcggcgttccggatcgttaaattcatcaaaaatagtgactgtgtcatacgttggctcatttggctcagttgggttggccatgatggacaaaacaacagcttctaagatgatggcaatgatatagatacagttgcgtggttggcggaaagaaaaaaatagtggcggagatgcgacacctgatcagaaaggcggtcctgaaatgcatgcaggggggtaaggatgagaggcccaagtgcgtcagctttccttgtcactactttcacaatggtttagatttaggtatccgagagatgcatatgcaggtaagatacatcagggaaaatgctcaatccctttagagcaggaccaaaaaaacaatctaatgtgttgatttctatggggcgagacgggatatcttcgagtcttgacttctcaccgtcctttcactgtagttaatcaagttgaaatgtttgtttgttgttccataacgaggaaaggaatcaaattggggtttgtgaatcttctatgttgatgtgatccttagattggctaactggaggagagatggctgtccactatgttgtagatgattccaagcttgcccgaggattcactagttagtatgatagacgaatgagtcacttgaggaccacctgagcatgtccttgcctagggctagtacttgataagtaagacctcgtgttctagcaggttccccgaatggcgttaccgcccacgtgatatgaccattgatgcttcggcggggcgatcccccggaacgactaaaggacaacaacatccaggggagcttgattgatcgttaagtctgcggtgatacccttgaattatttcttctttggattcctctttcttcacgatttcttccctcaaagttttatgtatgcctgacttcaagctctccgcaactttggagggccacggcgatgatgtaaggctcctggtccaggcgtctgtaccgacgccattgaccgcaccaaaccagacagactactcacattattttggcctaatctaggttcgcgctgtggtcttcccaaatccaaatgtcgtcctttcggcctctcgtgatgcaacagttcggctctggaagctcgtctccacttcacctcccgcatacgactataccatcgctgcacatggcggcgctttcatcaacagcttagcctacattccccccacacccgagttcccagagggccttgtactttcggctggacaagatgcaataattgaagccaggcagcctagtaagagtgcagaagataatgcagatgctatgctcctaggtcacggccacaatgtctgttctctagatgtgtctccggatggcaaatgggttgttagcggcagctgggattccacggcccgtctatggaaggtcggcaaatgggagtgtgatgtcgtactggaggggcatgaggcaagcgtctgggccgtgctggcctatgacgagaacacaataatcacgggtatgctagcttcatgtcgccctaacaaatccgacaatgctaacatcaccgcaggctgcgctgacaaaatgattcggatgtttaatacctcgggaaccctactcggaagcgtacagaactccaacgatgtcgtccgagccttgtgcaagcttcctgcctcgaaccctacaggggctcactttgcctcggccagcaatgatggaatcattcgtctttacacactgcagggtcaacttgtcgcctctctgcatggtcatgaaagctttatctactcccttgctgcgctcccgtctggcgagctggtgagctctagtgaagatcgcaccgtgaagatttggaacgggacccaatgtgtgcagacaataacacatcccgcaatctcggtgtggagtgtcgcagcttgcagtgagaccggtgatatcgtcactggtgctagtgaccgcattgctcgtgttttcagcagaagccctgaccgtcatgcagccccggaggccatacatcagtttgaccaggccgtcaaggagtcggctatcccagagcagcaagtgggtaagattaataaagaggagctacctggtccggaatttttgaaagaaaagtccggaaccaaggaaggccaggtccagatgatccgagagcctggtggtaccgtgagcgcccacacctggtcatcagcaacacaggaatggattgccatcggtatggtagtggactcggctggaagcagtggtcgaaagaccgaatatcatggtcaggattacgactacgtcttcgatgttgacatagaggatggaaagcctccgctgaaactaccatacaatgcctcgcagaatccatatgaggctgccaccaagtttattggagacaatgaactccctatgacctatctggaccaggttgccaactttatcactcagaatacccaaggtgccactattgggcagtctcaggaacccgcaggctctgatccttggggctcagaccgacgttaccgtcctggagacgccgcagcggctgaagagtctcggccacctgcccccgagtcgcgccctaaggtgctccctcagaagatctatctctccatccgctcggcaaatcttaaaattatcacgaagaagcttcaggaattgaacgcgcaactcgtgtctgatggatcaaaggacgtggctttgagcccctcggaggtggaaacggttgtctccttgtgcggccagctcgaatcttccaaacaactccaactttcacccgaggttgaatctggagtgccattgatcctgaagatcgttacaacctggcctgccgccaatcgactccccggcctagatattcttcgtctactcgcggcggctgcgccatttacagcatccgccgagtacaaagacgaaaatgtcgtgtcgggtgtgatatccagcggtgtttttgaacctcctcttaacgtcaacaatgcaatgctcgcaatgcgaacatttgctaacctattcgagacgactgccggccgtgatctcgccatgagctcatttgatcagatcctggcaggagtgaaaactgctttggctagcagcggacaatcaccgaaccgcaacctcacaatcgccatcacaacactctacatcaactttgcagtttatcttacctccgaaggtagagaccaatctccagaatccgcagaacgaggtctggtcctcctagaggaactaactcagatcatttctggagagaaggactcagaggcggtttaccgagcactagtcgcgctcggcacactggtgacagcgcttggagaggaggttaggagcgctgctacagaagtctacgaggttaaaggtgttcttgcgagagcctcggcctctggtcctggaaaggagccgcgcatcaagggcattattagcgagatccgggaggctctctaagagtgcgtgctattttttttattcggtatgcgcagattagagatgcattccttcctaacgacgacaacgcgattcccaacaaaggcaattcatatcctcattttccacttcacgtagatacatcatagatgtttccttatttttgaatcaactagcattctgaatcattcattctaaatcattcactactcccttacaatctgccctccgcatcaaccccaatctccaaaacctgatcaacgccctgatacttgggcaaatcaagcccatacttatcagtaatgttcttcgtcaaaaacctaccaccgataaaatgcctgccgtgataaaatgccacgcacggcttaggtgcagacaaactgatcaacgcatgcggcatgaacttcgcaccgggtccttcctgcggtggtccggtctggatatcccatgagctgggcgcatcgacactcagcaccgggacattggcggactcgatttgcgagacgattttgtcgaatggatcacgcaatggtccgccgaaggagaagccgaagatggcgtcgaccaggaagtctgccgtcttcagggctggttcaaagtcgtcaacgaaggggactgagaggttatgcagttgggttttgaggcgctggcttgggtcagattttcttctttttttttttgcttctacgatccttctggtttgggattgcgtacttcgtaaagctcctttttgccctgctttgggtagtacagagacggggtgtagccgaattgggctaggtggcgagttgctacgagaccatccccgcctggtggtttgttaggttgctgttgctcgaatggcaaggttggagatacttctcaccattgttccctggtccgcagacgactagaactttcttgcctgcgcttggggggtggaccctccagactagttgcttgtatcagtatggcctgactacatgctcgagattgatggttctgaccggcttccgcgacagagaggcctgctagctccatcaactggtccagagaccagccgccgacctccatgaggtctttgtcaagtgacgcggcatctttggctgagattgcctaggaacatggttaggttttgagatggagctaatatcagacaactataccttcaacgacattattgctggtttactgtagcgacgaatggagggaggtagacggatacgggcgaatgtagaccggatcatgtaagtactttagatatagtctttcgactaaatgagcaattgacagaaaatgtgtaaatcaaaatgacagccagctctgagtagatctactgagggtcctcacgtcattacatcatacatcatatgggcgctaatccatatttggctccatcggatcaacaataattccggcctagaacttttgcggagggcagacgggatcatcaaaagaacagtcttgcgctctcccaattgaaacagcataacgcacccgccaagatggttctccggattcgactcgcccgctttggcaacaagcacaaccctttcttcaacatcgtcgttgcgcaagctcggtacgtggtctttcccccgtgaatggatacccccgatacgcccggcctccaacgccaaacacggacgttgtcaggccaaggagtgcttcaattgtgcacatatctaagatgaactgaaattgaccctatgatcttcagctctgcccgcggcgccaagcccctcgaagtcatcggcacctacaaccccatcccgaaacgtcccacgaacttgtatgatgagaataccgaaacccgtccatataaggagattgccctcgaccggtcacgcgccaagtactggcttggtgttggtgcgcagcctagtgatcccgtctggaaactgatgagcatggtaagcacccttgtttgtttgatccgtgagagttttgggaatcaaggatctggacggctattgtcgggccttcgttttaagcagatcacatggacggggattacgttgttattatacggactgctttctgactcttaacttatcttaggctggccttgttgcgcccaaacctactacctttcacaaagcttgattccgactctttgatactgtgtctttccatggttttcacctccgacattctttgtgtactcggacggccaccatccgggaatttcaaggcatggtactatcagaagtcgcgcagtgtttctttattctttcctgatttggcatttttggcgttattgagttgccttgtgagaacctctgtatattaagtggcagcctgactgctctgagtctacgcggtagatgagccgcatgaatatctactgatatgacttgaatttgtctaggcggcacatacttcggaccgaggtagcctataccttaccagcatactttccataaactgctcatatattgttgagtcatgaggtacatagatgctactaaaccacactcgactaggtaaatcttaaatggatcggataatacccttggaacccgatcgtatttgtcagtaaacctgaaagtcaaaacatttgacgcgcctatgaccagttcaggcacgttgtgaagaagtaggtgctagtaaagcccctaaacagcggcttctctccacggcccaaccaaatgaactatcggccgctcgataagcccgagtcatttccctgtcgcagccaatcccatctgttgccggggttgggcccgtggcaattggtcgatgaccctggaggatcaccgggttttgactttttagattccatgggcgtacaacgtatgcggtgacttttattattataaaatgggttggatatgtgatgtacgtggtgatatgtctcatgaggtagtcgatatcgagccgttggctattgcaatctgggctggttgaagtagatatacagtatccaaggttccaataatcggtattgtattgacttggtaccagcttagggttgcctatccgagtctacattcaataaacatgcacctagtatatgtgtgtctcatttcaaagagccccatcgcgtgcagagccggggaacggtaagccgcttaggcactgtacttgcatggccggtgctcagcgatatattcatgatccaccgatcttcagagaacagaaaaagaaaagaaagaagagaaacaaaaaccggggcattccacagtcaccaccggtcacctcggggcacgcactgggccagtgtctgcatgcggtcggtttctagggccaaaggtgtaagacggcgtaaaattgagtccagattgtgtaaagagtgtgaccaggtactgtcatatacctgggagtacatgcagtcacgggcagacatgcatagaaccccatgtaccgctctggtcacataccggttccccattgagtcgcgtcgtgaagggcagatccatggatctggcactggtggactggcactcgaccgttccggactcttttcttccccccctcccctgcactctccttcatcccctcctttcaacccttttccctgcatccatcttaccattcgtgtcaatttccatctttatctcaatcgttttcaaagcgctcatacctgtcgcaaatccgatgagacaccattcgagtgcactcgactttcgatcgaatcgctaatcgccttcgccttccttcatttctgtcgttgcatcgcgcttggtgtacggtatcttgtcgcattaccgatcactgccccgacctccgactgtcaaaaccctgcgactccttttttcttcattaggactatcttccccctgtgtgatcgcgaaaccctagaaaaggcgaaaaaaaaaaaaatccaatttttttaaatctcgtggagggatgagcggcagctctagccagtccactcgtacgagtcccggctcttttggaactacgcagctcacagagtccgtgtcatccggttcgcccccacagcagtcactcccttcttcgcaggtgcctttgacggctcagcatgcgatgtcgaccgacgtgtacagtccgaatgcgtcgcaaccgccttcatctatgaatccatctttctcataccctttctcccctatcggtacaacagcttcattcgataccaacatgcgcttaggcgataacgatcgcaacctccagggtctaaatggcctgactcgcggaaacggaggcgccattctcatgcgcaaactgccgcgaaatacgagccgcgaagccctgcgcagcatgcttctcttcgccaaagactttgtcgacgccgactttgtcaccttggacctgcccgaggatgatgggttcttgactgcgatcgcgcgattcattactttgccagccgccgaagaggccagatcactcctcgatggcaagccgaactccaaaaacgacgccaacatggtcgtcgagatgtaccccggtccgatgggcgcgaatctgtccaacacccgccgtaacaccatcgatcacaccgccacccgtgcgttaatgggtgcctcgaacggtcccctggcgcgtcaatcgtcgcgctttaacggcactttccaaagtttggagaggttatccaacgccaaccccaatcaggctattggcgaaggacttcctccgacctccgaatcgcgcatgcatagccttttctccccacaatctccgatcggaaatggcattgataacctcccacgcataactgggaagtctatgatcgatgaggacccggacgaggagacgggcgagctgctcaaggatccggtgggctatgcggagaacggccattcttccaatatctccgctgggcgccgagcaaccaaccctcaaatcccgaccaaccgctttgccaatatgtccctatcaaccaacatgtcctcgccacctttgcagaactaccctggaggtggcgcgcaacgcatgggcggtggaacacccacatctggatacccgaaccaaggccatggttacccatacaacgctcagcataccccacgccacagcctgcctgctgcgaacccgaatgacctgaatcctccttgcaacactttgtacgtcggcaacttgccgccagacacctccgaggaagaactcaaggcccttttctccaaacaacgcgggtacaaacgactctgtttccgaaacaagcagaacggacccatgtgctttgtggaattcgacgaggtcgccatggcaagcaaagcactcaatgagctgtacggctacaagctgtcaaacagtgtcaagactggcatccgtctcagcttctcaaagaatccgttgggtgtgcgctctggtcaacccggcagcatgaactcatccaactcgccctctgggcagggcgcagtccccggaggcagcagcttgagtggaatccacaacaacatgttctcggccgtcaacggccctcctcccggactggcagcaccccctggtcttggcatgcccatgcctgcgcctccgatgcgcaatggcacctccatgcacaaccccgtcaatccgcatgctcaactgatgggcaatacttcatacaacccgaactcgggcctgggaatccgaaacggagccaattccatgatgatgtcgccgccgccccctcctaattccggcggcaacaatccgacaccgaacctgaacggctataattccttttaccctgactacatgatgggtcgctaagcccatccaagcgttatattaagataatgcccggcatgtttgaacgaactgggatatctggcgcatttggggatcttcgtttcgtgagctagatcagcattcggcggctgcataactctcgggagtactgtttcggatttgctttctgtttttttctcttcttttctgccagtgcttttcttggctttcgtatttctgttgcatgggaacctgggcgctctcacattcctttttgtgttaattcgtttcattgggaggattgcatttcaggtcattgccaaacttgtattcttatctggtcggcgcgaggcgctcgagagcgcatgttagtttctgtcggccattgcgttttgttcacaccttcataccctcttgatttcttgcttttattctcgtttatctcgctcgttaccttgattcgataagcaatgcacactaatgcgtgtttgctgtatgcctacccaggatctatacgagctgttatctactttattccgtgattccccctgtttgttacatctatcccctggatctttctcgatgcatcgtctgcgtggatcggaaaggatttcgctgatttacttgctttatctattgcaatgcgtgtttatttctatgcaagtacgaaggaagggtcttatgtggctttctttgacttctcttctaatatctctctactcaaatggcatgagcgcgaaaggacatgacatcggctcacctcgaccacatattgtcccaggcgttcgcgttggttttatttctctgccatattcttcctgtctcggcggagacaaaggcgtccggtccatgcatttgctcgacagctcctctacatcttgcttgcattgccactcgttttgctttgggtctggcttactctgattttccaggagaagaatggaagcgtggcgtgtctattttttttagtcttcttcttatcccgtcttgctcgggggtatgataccgatacatttgcttcgatctgtacttgatacaatgaactggttccagtgaatctggagaatgaactcattaatcctttcataataatgttagtctgtaagagctatcatggacttttgaactcctttggccacttttcgtatattttaggatctgtgaagtcgaccttggaaggctttcaccgtaagattaggtagatacatatactcaggtgtcccaatatactccgtacagtatgagaagatgtttacttctgtacatattcagtggggataggtcacgtgatgacactaccgagagaagtttcttcgcctagacacctacacttcccgctccaacccgacaatctcccatccgcaattgttgctgcaaaagggtcaatggcagctggaactccttgattattattatccagcgtcttccattcagttcgacatcaaagtttccctcccattcacccatcatatcctccaagatgccaccccggatgcagagccggagtgtgtccaacacccttcttccctacctcacagctacctcctcatcctcactctcttccattccttcattatcctcttcatcatcacaatgtctttcgcgccaattttctgccacggcagcaccacaggcacagaccaagcttcgtcggcaaatgttcgaatggctcaacactgaaggagccgttttcaagcatcacgtccctggcgaaaccaactatcttactcggttaaaacagcgcggccccgaaacttcctcagatgcttcccgtccgttccccaacaattcaagtttcatcagcgagcctatcctcagtgaggagctacggaatgaggtctatcaccgcgttgttgaacagaagatgagtcttcgcgctgtcagcgtacatcttggaattgatatgaagcgtattgctgctgtcgtgaggttggtagaattggagaagagacaacgcgcgcaggtaagaccattttcccttctgctgttcccctttcccctttcctttcggaccctgcttcgaccctccacgcatatgatgagtcacaaaaaatcgattagtcttgaagacacccacatggttaaaccttactttttgaactgaactgtgttaccttacattttggattcctatcaccttttatttggtcgcttgagaactgacgaatctcaattcagggtaaacccctagcactgccatatgcccgggccatccacgagatggtccccaccacacccctcgcccagcaaggcgagcgtcaagaataccatgaacccatcaacgacctccccgcccatcctttgacaggttcccaaatcttctacccagttcccgaatcccgctccttcacccgtgtcgaggctggtcgcgtcttctccggcgccccagcaatggagcactccgaggccgcggaaatctcccacccctccgacctggccgaaaagatcatcgaggaccccaactccatcgcctgggttggcaagggcgccaacgctcgccaaatcctgcagcctgctgacgtgcgcattcctcaccctcacatggttgctctggagcgcgaccgcctcgcgcatcccaacgagcgtctggccgtttcagaaaagcagtccaagagactcaagcgtcaggacgcaattgagaaggagcgtcgtgagcgcttgcaggctcgccgcgagaagaagctgactgttgtctctcccgaggactcgcgcttcgactaccgtatcaaggatactatctacactccggagacgactggcgctgatggccgtggttcgaaggctgttggtcgtcggtacggtgtgcctcaccgcgaccgcacacgcggcgaaatcaagattcctacccgtgtggaggcttgatttatttgagatggtcccttcaaggactgtttcttgtttttttgtgtttttcagcaactttttcggctacggcctttgtaattttagtatgcatactcatccaaggatgtatgatggaggatgtcgcttatgtactataaccggatgatgtcgaactctttccatttcagtcacctcttgccgcttttaccactcgagtacaactggtgagccttacataatcacctctctacggggataatattaggagtgaagaggctttctcccatagaccgcaactctgctcataattagtactcgtacccaggccattaaaaggggatacgttaaacccacgtctgaacataagcatgcaacttcttatcccgcaactcccgcttaacaaccgcattatgaatcttcgcgacatcggcactccagcccagcacctgcgtatacaagcgcaacgaataagaatcaatagcctgctgcaactgcacagcctggtacttccccaacgccttcaggtgcggatcgcgcggccaaggcgagaacggcagcgcgtagaccgacaagcgcacgtcctcaaagcccgccgcgatcatccagtccttgagcttgtggtagatgttcagctcgcggccgctcttctcgccggcgaagttcactgcctgttgccattccatgagcgcggaatctgatttcagcgtgccgtcgtcgctgcgggcccagacggcgctctcgtgcgattcgaagtacccgcctggtttgaggtggtcgtagatttggtgtataaaccctggccagtcggctacgcatctgcgtggtgtgttagtgttactctcgttagtatagaccgcgaatgcggtaatgatatcagttaccctgctagacatcgtgcgtggatgaagtcgaagtggtttcgttcgtactgccattcgctttcgaagtcctccatgatgaactcgatgttcggggctacccagatcggctggatagggctgatgtcattcccaatgacgtgggcgccggggaatttcctatagtctggggtttagtcttgccgtatataaaaatggacgatgaagggtttcacatactcggcaatgtccatagcccaaatgcccgttcccgttcctaggtcaaggatgttctgcggtgatgatgtgatcggggcattgtagagctctcctcctagcagcatcagccatctgcgccgcttggttagccacattcgttcggtcgttcgggaatgcgttgctacacggacatgtgatgtgtctgaagaaagagtcagtgtgtgcacatggaaagtcattagttagttagggatggcagcgtcttaccagatccattcgatcctgctcctcctcgtcattcggcatcctaactcggtcagcctctacctagaggaacgtatgaaagtgtgcaagtacatataacctccctagtcgtcgatcgattggtcattgaagcttagtacgaatggtatgtatgtatggactacttaccgagcgggtactgcaataccgccgaccattttcatactcgaattccagcacgctctccgacagggaggtgagatcggacagctcgtcgtcgaattcactgttagtgtcctacaagtcggttaaattcccggtgtcgcgatgggccagacggtcgagtgagtctacatacgtcgccaaaaatgtcgaccgcgattggagccgcgttgacaggggtctgcgtgtcaggctcggcgttgattgggggtacggatggggctcgttcggatgaggaagtatcagaaaccattatgatgggaaaggagagcaaaagcaacggcgaaatttctagaggaaacggcgctggataaataaaatctattgcccttttctaacagcctcgcttgccgattcatttgacgcgagtggagggcttttgggttttatccaaactgtcgggttcaaaggagacggggactttggatctatcgtgcattctgtcgcctctcaatttgctgattgccaatgggaatcactggaagaggttggcaatcaaactccactccacatatcgttgtctttgaacccattggttcactggttaatatcgaggtggcccttgacaaagaataacgggtcttggtgcttcactatgatgggtttaaggtctaccggtcccacgtgacagcgtgctcagctttactcgggagcggaaagcggcatggtctcggcactaaaacggaaggtacccggacattgtatgcctcgtctttgtacatggaactctctaggactgaagatgtctgaggtttttgatctattgtactggagtaatcgcagttatttcaaactctttatcttactgttctggtggtcatgccaagtacttatccgcgttcctactatatataaccaataaacacttcgctaatgtcatacataattcattccctaaccaattctacaagctcaaaggaaacgaaacaagaactcgaaaacatataaacccgaagatatcaaaatcacaatgcacagcgcttcgccaagataaaatcaaatataaagagcgacagatatgaccagcagatcccgctgttccatccagcctccattcctcccattctcagtattagtcagatactagccaactctcaacgagcctccccgacagatcgacagcgtcgtcttctcgccccaacccatccagagatcgcatcggactcagagtcgtcttccttggaagaagtctggaaaatagagccgagtgaggcgagggcactctggagccatgaagtagtagcaggggaggctggggcagatggcatatttgctgactgcatggtcgagctgggtgaggggtgagatagtgagatagtgagatggcgagatggcgagatgcggggtttatagtttgtggttggtggtttgcgagaggaggtctttggtaaatggtatggtacctggtctggaagacaatgatagacgatagacaatagactggtatgtaggatatatgtaggggttggaatgtaagatagagagaggttcagggggtcagcttatggtatttaaggaatcgaagacaatacgaacatcacatgcgaacaatgcccagggagacgacaaagcccggatctggatcacctgcataagtacctaaatccgggcttcgtattatttgctttcaacggttccccgggttgcttctcctacttcggtcatgctgctttctcttgattggtgatgtgatcatcgcattgtacagatttacgtattgattcggccttgcacatagggcttgttatgcgatcgtcgcattggagcaacggctattggacgagtctttgccttgagaggcgttgtactgcgttgtactgcgttggatgcgagcagatctgaaaagagtaaattgtatacaatgtaggctcttggttatttgcgacatttttgtctcggtccttcgggagtatcgtgagacttacatatgttagtagagatagacagaagccatacatcgtataatttcaaatggctaggtgtatctgcatggatcatcacccctcaaataattagtgagataagtacaaggtaggagaatacaccaaggcctccagccggcagtcggaaacaaagaaaattatacattgaagaataaaagcatggacatctcgttcgtgtatatgaggatgtccattgcatagaagttgtatgcaaaagtaaatatcggtagacaaaagaagccagccacaaaggcaatgtgagcggcagacgcgtatgcatcgcaaaataacaaaatatatccatatggccaaaagaagatccacgaggaaaaccatgcaccgggtctgaggacctcgaagtgaagtgcatgccaccatgacaaaaatatgaaagtataggaaaagagacgttgctatacggggtattcaatgggagagacagaaaaccaaaccaaacaggttgaaaaaaagagtgatgggagcgtgtacggaccaaacaaccaaggtatggtaactcatccaaatacagatccgtcttcattcttcatcaagaggcacgatcgtcgcatcactgcctggcgcgccgtctcctgatgttgaatctatactgtcgagacttccgctaccccatgaatcctcccgcatgatttgcgcggcttctggtagggttggcttggtctcgaagtgattggacttgttagcgggccgggggatcgagggcgatgggggatccacccgtggcggttctttgcggtagccaccttgcatcgggctggatgatgtatcaacagttggcgaggcggcgcgaggagaatccatgaacccgcgccatttgcgccagccttcaaagtcaatcagggcttgcatgcagccccattctgtaaccttttgctcaagccaagggaatccgacgggctattcgagacatattagcatattatttggaagaataaaataggagatgatttaccttggtcaagaaatcattgcagccagcagccaatgcctcatgtcggtcactttgcagactgctagctgtcaatgcgacaataatgactggactccggaacagcgatagatctgacaaagtgtcctcttcactgaccgtacggtgaagcccaggtcttctctccgtcgcaggcgtactggacgcgctgaagcggccagaggctgtcttcgggaagacaccaatgccattcaagcgctccaagcgccggatctccttggtggcttccaggccgttcatcacgggcaactggatgtccatcaggaccaaatggaatccaccttgtcgccattttcgcaccgcctcttcgccgttcattgcacacttccagcgcaccttcaaccttttcataaaggcctccaaaagcttctggttgatgatattgtcttccacgatgaggacattgattggcggaacggtgccgtcaatcaacccgccaaacatagcaccaggagaagtggctgctttcgtttttcgcatcacgcgtggtgatgccgttgccgggggagtgtgtgatttcacctgcggagactccaccggcggtggtgccgcggggggtgtaggcattgagggaggaggagctgggagaggttgggaatgaggagtagggccagtttctaggcatgtcagtggctatgttaagtaaaaaaagttttttaaacgtacctgttataccgggagtttgagtgttctggttgtgaaggatagtgggagaatttgttctgtgtcgtgtcagaggaggtcgctgatgccgtgccctacggctgcccggagatggcagtaaaggagcgacgccagtgttgaggatggaaattgacggcgcattggccgctactgatggagctcccgagtgtgcagacggtgttcccgcgttcaccttgaccggcggcatgagaggaaagtaatcgccatgttcgccgggttctgattggtggtactggtacattgaatggcgcggcgatggctttggggtccgccgtgacggggcatcgatcaccaatgcttcctcgatgttctgtcctccagggtagtatgcatcgagtatagatattaggatttcctccgggctcaagagacgctcagtgagacctggtcgattcgagccctctcgtggcaaaattcgaatagcaatatcaggcgagtcgaagcttctccccaatgaattcccgtatttcatgatgacatggtcgcgtagctcatctaccaccgcatcctctctgcagggcaccaaggtggccgagccaccgggccgtttgacccaaacccgacgtgtgaccatctcgcaaggaacaacgggcgtgaaaccactaggctggtctcccgaagaaaaaacactcgcgtccagtagcccactaatcaggtggtggtgtgtgtctgggagaagagattgccgacggatcgcaaggctcgggcgcttgcttgaaggaggaaagtaggaggtcggagggcgatcattcgtaggccactctgcaacagtatgcagggtcggagtcaatggagtttcgggcaggattggtgtctgagctttcaagtgggtggattggaaggaggtggtatcggaatgctgaggagtcgataacggaggagtttcaaggggagacgggagatcgcccgagataggagttggcaaggtagaattatatggctcggtcaacggcgtacaattgcgagttcctgtgtgaggctgttccgacggcgcagaaacggaggaacccagttccgggtttgtccctggggataggggctcctgtacctgaaggatgcgagaaggagtgatttcatccaaatgtttcgaagatgcgatgctataagctggggatttgttggagtcgagagggctcgaggggggttttcggttgaagtgggcactcggatctgcatccgcttttggagataatcgaccaagcaacttcgccttcagacgtgatatccgttccgtcattgtcgagtcttcatgccattctaagacgatagggggagaaaccagattctaggtaacggttgttctctgtcgatcgagataaagacaatctcgtactttttccggttcagacacgtcagtatagaccaagtcagagatgtcaaaggttaaagaagttgagaggggaaagtagcgacttgggcagagtcacgttagttgctgatctcccgggccaaaaaaagctatggcctttttaatatgcaaggattcggggggtccttgggcttttggggggggggggaattttaggggatatatgaaaaggnnnnnnnnnnnnnnnnnnnnnnnnnnnnnnnnnnnnnnnnnnnnnnnnnnnnnnnnnnnnnnnnnnnnnnnnnnnnnnnnnnnnnnnnnnnnnnnnnnnnnnnnnnnnnnnnnnnnnnnnnnnnnnnnnnnnnnnnnnnnnnnnnnnnnnnnnnnnnnnnnnnnnnnnngtgggggtggggggggggggggaattttagaggatatatgaaaaagtgtcttggattaaaattgggcatctcaattgttgggtttatttttctgttagcgacgagcatagatatagagctggaatgtagtatacctaagacccttgagcttgtatagctcgtcaactactcctatacctatagcactcttattgcagaaccccttaggtggcctgatcttatccaacaatccagataacataatacacgacacgattcacgattcacgatctacagataccccacaaaatagcctacgtggcacgcccaaaagtaccagagctagctagacgcagggccaatggttctcagcgtcactggaatattccgaagagcggcatctggtgttgcacttagtagcaggatataccatccatcttgtcctgtcggtggggcgtagaagttgatgttgtcctagctgcacataacatattttccatatgaagtccacacattggtttgtggtgtcgatgcgctagtcgtgtttgtagcaactgtgtctttacttgtctggccacttggagtagtaaatatgaccggacaagccattgcgccagtatccctcaatccaagcagattggtactagaagccacaccagctgtggtgaaaatggcagacttggtactagttgaggtagtatcggggtgagcaacccaagtgttttggttgtcaccaaacgttactgtggctaaatcggacactcatctcgaggactcggagttcaaggcacacaagaaaacgcaaacttgttggttgcatttgacatggccagattaccgatctgggcttgacctgttcggcaaatgattaacgtgatccattcatgggcgagatatgtttaccatctgcatagaagataggcagcccgtcgacgttgttaccatatgcatataaactccacggaccatcggcctgtcgcttatccattggatgcgctgagccaagtgcaaaaatggcaagagccacagcaaagataatcgaaatcatgtgttgaaattgatgttacaaagttctggtttgataggtatgtcatgatcaagagttggacgcgtttgaaatcgtcctctatatatccattatctggagaggtaccctatcatttccccaaaacctcagtgggacaaactcagggttgacttgtaagctgagccatatatgggatcagtgtgtcagaacttctgtcttggataccccggaatccttggtcttgtcctcccatgctgcctaacccatatcttaagaacgctccttaattaaaaaccacctccaatgctgacctggctgaacagacactgcccatatgaggcgcatggtcgcaccgtacagtatcacatattgagttacatctatatccatgctcgagattggctcgccatcatccttggcccccttgtctctgagtaatacacgagggtcaggcccccactccgaattgcgcctatgtcactcgacctgactttttcactgcccggagagattaactgacacacaagttcagggaccctgcgtcaggagcctgaaaaggaaaagatccgatcacgataatgcatggcccacgtggatgtggtcctacagatcggggcggcacagaactgcttagcttacatggctagacaccataaaatcttttgacttcacaataatggtcgatgaaacagatgtctcgctattgatgatatgcccacttgaataatctatttggcacagatactaagtcttgccccatgttgaaaccgagctggagggccttgtctccctgatggcttggtacatcatttttttaggctattatttctatttttgtcagttggagatgacggtatgccagcatctcctagtaatgagcgtggcaatttacgaggtgtattgccttagggttagagtaggcgttcgtaaaagatcagcttgagtctctgagggaggtatataaattacgttaactatctttctaggaagcagatatcaatagtcttattttgagatcctgaggtccagtcatcatgagattttcatccattatattcttggcaaatttacttggtgctggcattgcctgtgccgattgctcctacaaaccatcaaccacactgcgaccaatagccacgagaacccgacttcgaaatacctataggcctaccggtactccatgtgcaggaaatgcccccaatgacagatctgtttggtgcaattacagcattgacacagactacgagaatgtcgtcccagacacaggtgttacgcgcgaatactggtttgaggtcaaagaagtcacactctctcccgatggattcatggctccacgtccggtcatgaccatcaatggcacctttcctggcccgcctcttgttgcagactggggcgactgggtggtcgtccacgtctccaaccatctgtataaggcaatgaacggttcgagtattcactggcacggtattcgtcagaactacacaaatccgaatgatggcgttccttcgctcacccagtgtcctattgctcccggctcgactatgacgtataaatggcgagctggccagtatggatcctcgtggtatcactctcatatcggtttgcaagcctgggaaggtgtatatggtgctatcattatcaatggaccggcgactgcaaattatgatgtggacaagggcgcattgtttctgagtgattggacgcatgaaactgtggatcaactacaccaagatgtccaacttcgcggtcctgtcaggaagttgtcaaatggactcctcaatggcaagaatgtctatggaaacggtacaaatactaccgggtctccgttccacatgaaagtgcaaaaaggaaaatcttaccggttgcgacttgtgaaccctgccatcgacacccattggaagttcactattgacaaccacataatgactgttattgcaatggatctcgttcctataaagccattcgtcacaaacgtcgtcagcattggaatgggttcgtttcttggcatccctatcgctctaaacatacgaatccagctaattttatacatccaggccaacgctatgatgttatcatcacagccaaccaggaatccgtggccgaatccttctggatgagagctataccagccgatagatgctcccaaaatgagatggccggcaacatccgcggcatcgtctactacggcaacaggcccaagcaaccgcgcacgcagtcattccccttcacaaacgtatgcgaagacgagcttttgacgaatctcatacctcacgtccccaaaaacgtcgatctaccagtttcgccagtttgggataggaacgtgacggtcagcaataccaggaacgcacagaatttcttccgctggcagttcaattccacctcgatgaacgtgagctgggagaacccaaccctgatgcaagtctaccatagcgatccgggattttctacttcaagtggcgtgattgagttgcccttcaagaataaatgggtatatctcttcatccaaaacaccctcgttactcatcccattcaccttcacggccacgacttctccatcctagcgcaaggacagcctgggcctgggaagccacaatgggatggttctattattacgcagaatcccccacgtcgagatacggccgtgctagccggaggtgggtggctgttaatagctttcaagacgaataaccccggagcgtggttgatgcactgtcacattgggtggcatgtcgatgagggtcttgcattacagtttattgagcgacaagatgagatccgggatctcattgattatactccgtttaatgagaattgtgctgcgtgggataaatatgtcaagacgaagaatgttgtgcagcaagactcgggagtttgacaatgcggagtttgtgtgatgaactatacagtggataggatagagagagggttgtatgttagatatatgtatttcaattgagctggttgtaacgcctcatttttatcagattattttgatattctttcagggctgccgagattcttgtggctaggatttatacggaggaactggcagcaggagcaggagtaggagcaggaagaatgcccttttcaacatcctcttgtgcgttcctcccgagtaaaagtaactcatcaatgcttttccctgaatcttttgcctccttgcgtaattttcgatagcggattcgccaggaaatatggctgatatatatccctgcctcgaaaacaaccaccaaaatatacataatccccccaagtatgtcaaatgacccttgtgccgctataataaaaatgtgtaagctattttattatacgtattgctaggatgcagaccaggcctgacctaatgcgaagagagaaaacagcccacccaacgtgtcgatgcagaggaagacccaatctattaacatcagcaggtgtccatcaagcgctgtaaatcagaacaaaacccactgaagccaatcacacgcccgtctctcttccacaattcaaaatacggcggcactagtcctgcaatgaggataatggcggctataaccccaaccacgatgtcgggccatgttaccccgttattatatggtatctgtcaagtttgattagatcttccatcagaaaaaaagaatagaaagaaacatggataatactctcaatgttaggatgagaagagcctccaatcccccaaataaaacaattgtgcctaagcataccagaacagccttagttttgctatagttgctattaaaattgatgagctgagattagcagttcgatcacaataaatccatacctgaaaccaactcactggttataatgaagaacttgactccaactaaccagcgaaaagaatccgaagatctgaggctgaatctgcaacgggatattgacttgctatagcaataatcataaagatagcggtcagcgatagatgcagatacaaaaaaacatcgaaattactagacaggaagtctgccaattagggtaattcaacttacctgcagaatcagatatgcgcccattggaaccgagcctacatgaatcacaaatgtaagccaattttgatctcgaaggtttcttttctttttcctcccttctccttcctatattaggcgacatgcttcatatatcaagagactcgaaatataatcctcgaggccctaaacctgatgaagggacagggaaataacttacagcttgcccacagaaacatcatcgctgcagggaatccatctgtgttcttacggcgccaattataccagatctgtggtatgagttggatgcaccagagaaccgtcccgatggtgccgaggacgttcgatgccagtgtgatattattctctgatgacattgtttgtgtataagaaacgacaaattagacaacaatatcacaatatatctaaaatgaaaatgcctggtatagcgtagatatccacaaaaacaactagattcgatgaggtgggctagtacttatactgagcagtcagcctaaagaaccaataactatcctggaaaatagcggaaatataatcggagatttaggacttttattacgaatcgttgagaggacccagtcccttttttatgcacatagtagcgcatgagcacagatcctctagtcgaaccagtcatggctcagggccaaatgcaagaatatgcaggcgagtatcgagataggagtgggttttgaggcctgttggtgaaatggacacacagaatgcagggtggtaagcacgagtgcagaataaaccaataccagactaaggaacgacaaggggaaaagggaaagcttgggagaacactatgcagcggtgaagtcttgacgtttgacaggctagtctagtcgatggatcttcgcgattagtgcatattggcctgtgacggagggggagatgttgcctagttacttgcctagttacttcgaaggcctggagtgagtatgataagaagaagcagaaaggatatgttgtcccgagatatatttctaccgattttgagcaaaaatttcgttcttagatataactctccccgcttttagtcaaggaagaactgcggagttgagtactagaacaagcctatcagattcgctcattatgggaagaggggcaaaattcaggctcatgagctaaaactagataggctaatcgatggagaatgagggctggatacgagatttagggctatatcatatagcgctgttcctttctggtgcattgcatttattgcacgtaactaacgttcaatgggggtaagcagaggaaagttactaatataagttatcagcattgaataaataattacacgctgaaaccgtttgaatattaatagaaacaataccttatgttgtatgcgccattctattctattgttcatcaattccccgacgcacacgtggctccagcccctcctatctgacagcgaacgcactctcagaaattgagcaactggtcttcattttctcgaataccacaggagtctagtcttgaaagttatgtactggcaatcccattagtcgctgggaaaatgaatgaggtattttgaagccagcgggggaggcctagattgctaatctgactctccgggctgcctgaattttaaataccgccttctttattaggtatagcaatatattctgccatagttcttgccggcgtcgaggtaaaagcggtacccgattaggaaggtggtcagaataagaggtccattcaatcttgttaacatgcactgtaatattgttactatactatttgataaattcaaattcgtgccaacaaattatgtgtctgagtcccattcactcctggttgcgacaccacctccagacacattcccagaacatcgcgcgtgtctctcggatcgataattccatcgtcaatcaacatcgagctagtagaatagcattctgcatctttcgccactctgtctctgaaactactcacctgtttcttgagcttttctggcgaaagagtcaggcctttggatttggcactggctatctgcacattttccataacaccagacagctgatctgggcccatcacactgcaacggccagtaggccatgaaaacaagaatcgggggctataggcacggccacacattgcatagttgccagctccgtatgaagcgcccaaaatgatcgagatatgaggcacggtggagcaactgaccgccgaaacgagttgtgcacccattttgatgattccagcgtgctcggccttagccccgaccataaagccagtgacattgtgaaggaaaattatgggagtatgtctggttttgtcagtatttggaactttgagtttcctgtctgaggcttactgttgattgcacatgcgaatgaactgagtggctttcgccgcctcattgggattgatgacggagagctggttggcaacgataccaacagggaagcctgaaaaaatcaaattagcgaacggactatcaacttcgatagtttgatcctacccataatatgagccgacgcagtaatcatattcgggccgtatttgggtttgaagactgagagacgggagtcatccacgatacgcaacaaaacttcacgcatatcaaatggctttcggatatcggggttcacgattgatagcacatcctcaatggggtatctcgggggcagtgacccaatcaacccgggcactgaggggacacgtgcttgaagggaagctacccactctcgtgatttgtgaatagcatcgaacctatatgcccgagttagtataacaatttgacaaagaccagatccatcatactcatcagacgcaatttggtctgcaagaccggttgttattgcgtgaactttggcaccgcccagctcttctgccccaatgacttcaccagtggccatcttcacgagcggaggcccaccaagaaaagcttgagcttggttctcgacaaaaatcgtatagtccgacaacgctggatggtacgctcctccggccgttgaggatccgaaaacaatagcacatgaaggctttccgtgtctagttcggagggcaagatcgcggaatagctgacctcctttatggaaaactttgaattgttgcggcaaaaacacgccggcctttttcaattagaaatgtgagtttcgaagggtgtgatcatgtgtaacttaccgattgaactaaggagatcagtggaaggtcgttctcaaatgcaatctccatcatgcggttgactttcagcactgttgctagtcagcaattgtattgagaatatatgttttgttgcttcatacctgtcatctcattccaagctcctccactttgggtcggaatatgagacataagaagacatatgcgtccacaaacatttccaatcccggcaatcagattgccacatggggtggaatcctcattgccaaacccggtaaatgctccaagttccaagaatggcgagtcttggtctagcaatagcgcgacacggtcccttgctaatggcacgttaaccgcgtttcttatataaacggagagtaaactcacgtagcagctgaccccggctgatgtgtcttcgtagagaaacatcatttccttcagcggaaacttgctttagagcttcctcaaatctgtcaagcacaggtgtccaactttctttgtttgcttggaactgcgaaccccgaagatcgatattggtgtttgccacaggaaacgacgattcggtcgccattgtgaaaaaagggtttagatctgcacacaatacgtatttttctcaaagtaaaatatatttcaagcagaatgtgccgcatcaagaatgtctaggccgagtttctaaggttgactcgagtggaggccgtcggtccgaaccccggaagtactaccgggagcggtgcggaccagctggtgatagtgtgggggaatgagatggaagatcattgaaattgtataatctggtaattacatttgtctgattggaagctgcctttgacatgttataatcaaccgcttgttcccaacctttgacaagtatacaccattcccttaatcaaaataccccaaatggattccaacctcgcacttgtctatggccctacagagccccagctatgtctcaagactatgggcgctctcatcgaggaccaggcagcccaatttggtgaccgtcctgccgttgtctttccatggcagtccgtccggctgtcatatcgccaactggcggaccggagcaaagccctagctggagagatgcttgaaatgggactgcaccatggggactgtgtgggtattttggcaggcaactgctaccaatatgttgaagttttccttgctggtgctcgaatcggatgtcctgttgttgtgctgaacaatacatacacgcctgcagagcttgaaaatgccgtcctaaggagttgtaagtctgctatgagggttttctttttaaaagggcaacagctaatatagtaacagcttgcaaggttgtcttccatgctaccagcatcggctctcgggacctgacaggtcatatcagaatacttcaagggacacaatatccaaatccagcactccccgatctccgccggattatctcactcggacttggagaattccgcactggagctattgaggttcagctctatgacacggttacttcgaatagtccttctgtgtctataaacaatgcgacactcgagcacgcagagagacaggttactccccaagatgtggttaacttgcaatttacttctggtaagtgacaacgaaaatccagatttcaaactgaatattcacatatttcaaggaaccacggggtctccgaaagctgctatgctcacacatacgtaagtccgtgaaattggtaactacttggagcatgtaaattaatctaacctataggaacctcatcaacaatgcacaatttgtcggaagagcaatgcaactgaccccggaagatgtgatttgttgcccgccacccatgttccattgctttggtctggtgttaggatttctttcatcatttttctacggaagttcaatcgtctttccatctgactattttgatgtcgcaaaggtagtcgacgccatcatcgacgaagacgccacggttcttctcggcgttccaaccatgtacgtggccgagttagaagtgatggcaaagacaggacagagaccccggcgactacggacaggacttgcatctggctcggcagtctcacaaaatctcatgaaccagctgcgagagattatgggcgtcgagaaaatgctgattgcatacggaatgacagagaccagtcctgttagctttattacttccctggacgatagcgatgagaaaggtacaacaactgtcggtcgagtcattccgcatacggctgcaaaggtcattgatgaaaagggcaataccttggctcgagggcagcgaggagagctctgcacaagtggatttgtgctacaaaagggatactggaagaatgaagagaagaccaaggaggtgatgcgaagagacgaaaacggcgtcttatggatgcacactggagacgaagctatgattgattcggatggatatgcccatatcaccggtcggatcaaagatcttattattcgaggtacgttcaattctctgatacaaatccccaaacccgctcttactgatgtttgctgccaacaggtggagagaatatcttcccgcgagaaattgaagaacgattgatgtcccatgcatcagtttccgaggctagtgtagtcggtatcaaggatgagagatacggtgaggtcgttggctgtttcttgaaggcatcggtgcagtttcagaggcccagtatccaagagctccagcagtttgtcggagagaggctcggccgacacaaagcccccaaacatgtgttttggctaggagagaaaggtgttggtgatgacttcccgaagactggcagtggtaagcatcaaaaacacatgatgcgggacattggaaatcggttggtgggtatgttcaaggcgaaactttagtatagaacagataattacatttatttgcattactattttctgttgcggagctctatatggatatatatcccaatgacgaatgcggacgagaaagagcaattacctagtatcaggttggcacaaacatcaaaacagccctttttctctccgatttgaaactcccttgtctttgcaatgtcccttggtctccatttttgtccgaacaggtattgccacggaaatgtgtgatttacgtgcatcccgtccgagctggtccactcctcggtccgagatccggatactaaatttccccgcgtggagtgctttggagcggaccgaagcagaatcggaaaagaagtttagtaatatactctgattaactaactattctattgtatgataagcgatattgaagttcaacatcctaaaattgagatcaaaattcgacaatgggtccggctgttcgaatcgtcgaagtcggcccacgggacggccttcagaacatccgagacacaatacctacttcaattaagttggaattgattcaacggctccagaagacaggactacaagctattgagctgacgtcagtcgtctcaccgaaagccattcctcaactggcggattgtcgtcaggtcttgcgtaacccggacatcaagagactcttggatagctcgcaacttcggcttcctgttttggttcccaatgctaagggactcgagattgccatacagcacggcgttcgagagattgctgtgttcatcagttctacagagggatttagtaaagccaatatcaactgcactgttgcgcagggaattgaacgggctacccaagtggcatccctggctatacgttctcaaatcgctgcgagagggtaagaaaactggtcccattcccttatattacaatccaatggcaactaacctaaacagctatgtgtcctgcattttcgctgatccgtatgacggtccaactccattaccagcagtcctccgctgtgtaaaggccctcctagatgccggctgctacgaggttagcctcggggataccctaggcgttggctctccttcaaacgtgcgcgagctcatcaactacctgaccagcaacggtatcccgccagagaagctagcaggccacttccacgacacttatggacaagccgtagcaaacgcgtgggaggccttcaatagcggaatccgagtgttcgacagcagtgtcgccggtctgggtggatgtccatttgcaccaggagcaaaaggaaatgtcgcctccgaggatctggtttacatgttccacaatgcgggtatttcaacaggcatcgatctcccaaagctagtcgaaacgggtgtatggatatcgaaacaacttctgaagaacaactcaagtcgagccggaacggctctggcaaccaaattacagctggcagccccaagcacacaatccaaaccaagagctcccggcctcaaatgggacctttgcaacgaaacacagggtttacagatctaccgatcaggcgtgaacttgaaaatcgtcctcaacaggcccaagaacggaaacaccctgacagcaaccatgatctcggatttgacatcggtgatctcaaatgccagttctgatcccttaacctcccgaatcgtcattacagccaatggaaaattcttttgcacgggaatggacctcggcaagggaagcacagccgttggagaaggcggatcgagcagcgacgcacaattcacgggtttaacgcgactcttcgaggcaattgatcaatgtcctaaagtcaccattgcggcggtgaatgggcctgcgtttggtggtggagttggtttagctttctcgtgtgatatacggacatttacacaaggagcgaatgtcacgctgagcgaggtgaagctaggactttgtgcggcaacgatatccaaatatgttattcgagaattgggggttgcatttgcacgagaggtgatgctttctgcgagagcggttactcctggtgagttgaaggggttgggaattatttctgagattgcctcggaccaggagaatctgcgggttagagttgatgagcttttgattcgccttaaagctgcttcgcctaatgcttcgcggatgtcgaaggaattggttcgacttgcctgggcgcatggaggaggtgatgcacaagctgctgggattaaagggctatttaaagagatgatgcggtctgatgcagatggagcatatggcgtgaaggaattccaggcgaagaggaaggtagattgggatgcctatgttctagggccgaagcccaagctgtaaaggaccagattttttggttttagctagtatagacatttaaccaaggaatatggacaatatttgaactcttctacgagtcttctacaactcttctacggctgccgaaatccaccctcgaacgaatcagtagatggatcgaagccaaacccgttttgtggtagaggaagtgagtaaatctatggaactcctgaatttggatcgattactaatgaaaagaaagggattaactaattgactaattatagttctactatcatttttactatcatagagaagactgctcggttaccttactttctaggaaaaagaaatatacgctaagtatgatagtagcattaataacgttaaagataatgtagcaacggcttccgatcgtagggaaaccaagaggagttaccgaagctatcaaaaaactgaaagccacatggtagcagtggataccgcgttcactgcggcgcggatctgaagtagtaccatttccgcagcatagaggaatgttaggccgcaatagctaaccgtaaagatgaattgaaagcagtacaggaagaccacggccatggcaagagctccggtggtttggctgcagagggggaggtcgtgcctgcgaggcctgccatacagattgccatggccccagcactccacagcatgagagggcggcggccgagacgatcagtaatgaaataagcgatgtaaccaccgagggggagatagctgtcttcaaatcagagcaagaactccgtcacaaaattgaagttttgcagcccaataaccacgtctccctcccctggacccggaggacgatcctggattgcaacgaaggggaggaccatagggtccccatccataaaatttggcattcccgcaactgggtttggtgttatatccacagactgtgcacagtacggttgctgaagtcgtgccggctgtctgattagtggtggaatatttggagtttgtgcctggagggtccggatgtaatttcgagttagcgggcggggagcaccgtttggagccaactgccactgctcgaaggagacatagttttttctaacaatgataagaacgaccattctgacatcaccttcagaatctgcgaaccacttccgggcatcttgtcgaagtcgaccaagcgattctgatacacctgtttcgattataagtgttgggtagccgacgtttccaatcggatgagtacaacgagagggaggtacatatccattatccgcttctttgcccttcctcatccctaatcggtaagttgtcgatccgatccaagccgttccttcgctagggacacccatagccttgtaagaatcccgaatcacttcagtgaacttatcagtggcgacctcatgttcgctgcgggggacgaccttgatcaggccggtagagccctcccattgaaatcgaaatgcgattcccccaagaccgccgtggtcgcttgtaagtgcttcgattaccggtgttgatagaccgagcaccactatccattgatttccgtctgtatgttcctcgaaccatttggagatctggagtgcctctagacgcaagcgcctcagtcgtgaaaatgagaccacatgaccttgaggtaggtcagacatgagcgtggggttctctgccatcggaagtagaattctgtcagcatgtagattcagacgagggtttcgtcgacgagatatcacagattctactgaatcagtgtgtcaaggatctctgatgatgggtgacataatggaaataaagagggtgacgtaagttagttatggttaatgtaggtagaatattttcagacgcaaggttaaatccagaagaacgttttcaaggcggtattagcgattttgctctgctttgaaatatgatgagagtaagtcgttaggtaggagtagagaggagaacaagaagaatggaaggcagggacagcttcttatagttatctgttgtggtgctcacgtgccgatcacatgccaaatcaggcttcacatggctatttagttaactagatcttaatcattgtagagaatctatccttcttcatctctctctcgctccaagaggttataggccctctctccatcccatcagcattgtcctccctttgctaaaatttcatcaaaaaccatcaattttccatcaagctttgcatcaattttcatttctatcagttccagccaccaaagggcgctgtaactcgcttcataagcggtcgtccatagcttagacagctcgccttataagcggctgccctgaaaccttgggcggatttatactttccgccggtccggggtacccgaaagagccgtccccacaaactcttccccgcactggggagttcatccttcccaccttggaacttctcctgactcaaacccggccatggacatgatagattcaggtggtattaagcggatacgacaggcttgcgctaactgcaggtaaaattcctccgtcggctcttttttgccaatgctgatcacaaaccctctaggcgcaaaaagaccaaatgcacaggagaccgtcctatctgctcccactgtcgtcgtaatcatctagcctgtatctacgaaccatactcggccactctggcggaaaatccccctgcgcctaatccggtcatatcactgccgccagtcgagaataataataatgtcagttgggaattcctgggcactattgcattatattgatttagcagcagattgaacttttgcaaagaatcagcacaatcgagtcaaggcttgcggagctcagcggaaagacaactcagcagtacgatattcatgtcgattttagttaccaattcttgatactgattctaggggtttctaggaatgtaacgtctcgtttttcacacacacaaggccacgtacatttatcaccagaggttaataccttgtcacagcgagtgccgtcgccaccacctacctttcaagatcatgagttcgtgttctattttatacccctgaagaaatttggccctgtactaagcgtacggatagactcctccctccaccacacgtcctacgctcagtaatcgacacgtactttttacgcgtccacaaccaaccctactcttatttccatgaaccctcttttcgccagaagttagaaagcaactctttaccaaaatgtttgatcttggcagtgctttcatccgctgtacgattctcgacccacgaattctacgcgaatcagacgcgcgacgcatcgcaaaagtacgcgagagagtcatggctgtcagttctagcagaccatttgacgatggaagacagtctgaatgttcatgtggtacagacggtaaacttgcttgcagtggttgactatacaggtaagatggatggacactctaatttacttcctgctaacattgtgctatttcagccggtcgcgcccggtcgggatggctcaaaattggccttgcagcccggatatctcaagacttgaacctaatgtcggagcctgatcaatggctctcttattcagaacaagaagagcatcgacgggccttttggtcaatttacctccttgataaattgatctcctgtggccgatctcgaccgcttatcattctagatgaggattgcgaagttcaacttccatgcgacgagcacacttttcgacatggagaaaggagacagacgagtacaatcgatcagttgttgaactggaactcgaagtttgacgaaagccccagtccgttttcactcgttcttttgatggcgtcgatatttggccgatgcacacgatacgttcaccagagtaagaatatggacgagattccaccatgggatccaaagtcagagttctctgcaatcaattcctctttgctactcttagaatcatattctaagagtttaaactggcaactttcggatgtcctctacggaagcgttcaggtagatggaacagtcaaccgacaggagataggccagcttatatttgcccacactcttttccacctgtgtcactgcctgctaaaccatccgttcctcgtgagacgatggctcaaacctttcggggccaaggccccagctagtttttcctcccgcgcccttcaagatggatgcgaccatgcgaaacagcttatggatctcataaagcaggctacggaccatggctgccttgttgaatcctcattctatgcatattgcatagctgtagctggggggattcactctctagccgtacacttcaatcggaacaagggccgcgagtcggacagttcgcactacttgcaacagagcctagactctttggagagattagcaaagccttggacccacgcaggaaatatagtaagtttacctctgctcagtgaagaaatgtcgactactaacacgtttttgattcaggctatctcgctgcgagaattccattccatttctcatgctttcgctgtcctcctggacccacgtcacttaatggatgagttagactttgggtccgaagagatcatgtggtcgatgattgattatgcgataatgggcgctgatcccagcaaaaagcaactctcacccaaatccgcagcgaacataccgtctcccacatcgtgggttcttggcgccggaattctgggacaaccgggatatgacagccccaatgggaatatctttgggggtctcaccccctcaatgcgacttgaggaagtcgaacaatttctgaactgtagcccgggaatgaggaacattatctaaattgaaaatgtgtcttcggacgggaatttgcgactttcgcgggctcggtccgtccggtccgatgacatattccacgcatatcgactaggatgaatggataataagtagattctcggagcaaagaaaaggaaggttgaacgaaatatcctcatggctcaacaacatcaagcgtcaccctgggagggtgtcatctcgggtacgacggcggccattctggctagtgtgattgtataccctcttgatatgtatgattatggaccaatagcatgctttcctgaataattctaagtctattctagtgttaaaacccagttacaagttcacgttcaacgacagaaacagcaagatgccaacgatcgagaagaacaaaccgacacatcagaaaatcctacagcctacgctcatcatgacaacttcatcgatgcaatcagctacatacttcgcgaagaaggtattcttggtctatacagtggcttgggaagttcaatcctcggcacggcgtcaatgaactttgcctatttctactggtcaacaaccgcgcaaagcttacaacaatcagcatggcgcaaatatggaatctccgacacaaacagtatcgccaaggagctgggtctaggcgcaattggtggtgcaatggcccaactatgcacaaacccaatcgcagtgatatctacacggcagcaaacccggaaagcaactgatcggcaacgatcaatgtgggagacaatggtggaaattatccagagtgaagatggctggaccggactttggagaggcttcaaggtcaacttgatccttgttatcaatcccatgattacatatggtgtttaccaatggttgaagggggttctacttggactgaagaagacaaagggacttggatctgctgatgctttctgtacgtcttttcgatatatttcccgggctgtctgctaacatgactactttattagtgctcggcgctttatcaaaagttctagcgaccatcaccacgcatccgctaatcgttgctaagacaatgctgcaatgcaaaccgccagattgtcggaatggtaaaccgttctcgggatttaccgaagttcttgtttatattgtcaagaatgaaggcctcctgagactatacaagggcttggcgccgcagattatcaagggctttttggtccaagggttgatgatgatgttgaaagaacggtatgcccagtactcttttcaatttcaatatcacacatctaatatcacatttttaggactgagattttgatcagaagagcaatactacttaatagaaagcagcggctggcttctctgaagtaaggaattaggggcttggggtcatcaactaggctagaatatcgttcattcgcagatccggagtcggtgggataatttattacattaagtcattttatttcctgcaattaattcttgctcaaagcattttgtctgctgtaatgcgtaactggcaaatgtgcctgcgggatttgccatagatggttttagactactcattccaggcctaacacttgttgaattctaaagaactctcacaaatactttgttatactagacttttgttacttcaaactattcattgcctatgtggtacttccagcggttcggcttaaatcgtgctttctcctcaacttatcagtttaacataacattgttcaaaattagaggtaaaaaagctagaacgagagcgacaatataccaatttaataatgtggtcatcttcactaaggaaatatcaaagggctcggaaggatagggatccccggtccttcaccccggtccggcattgtggagcgcggtccgatcccacggtggtggtggttattgttgtatactttgtcactattcttactagaacgcattaataactatcctttcctaatttcttattcgctcattactccaaaataccaattagtgataacattgctcgctcccgctccgagatatataacacaacatccaagttaccccagcattaagttacaatttcgtttgatctactctcttcgaagtcccattacctatttttataaagaatatggcttctttttccactatccccttcgccgatcctctctggctgaaccgcggttacagtccgtactacaatgactcgcatcgccgacttcaaaaagaggtccgcgagtatgtcgacacctacattgcgccattttgcgaggaatgggaaaagcaaggcgttgtaccacaggaggtatgtacaagactgtatcaaggacaaggagatgaatatccgctaaagatttcctgaaataataggttcataagcgtcacgcggagctcggatacactgctgtcagctccttcccacttgcggccaactatctcaatggtcagcggcttcctggggacatcaagcccggagactgggatggcttccacgacattgtcgtcatcgatgaattagcgcgctgtggatatctcgggattgtctgggcattgggatgtggtaactccattggagggccgccagtgatcaactttggcaatgatgatcaaaagaggagattcctcccggatatgttgaaaggaaacatcagattctgtttgggtgtgaccgaacctgacggtaggatttctgaaatatcggattgagtacattgactaattaaaagaacagctggatcggacgtcgctggaatcactaccacggcggagagaaatggagatgtttatattgtcaatggagcgaagaaatggatcacgaacggcattttcgcagactattgtactgctgccgtcagaacaggaggggagggaacccagggcatctccgccctgataatcccgctgaaggccccgggagtaacttgcaagaagattgaaaactccggcgtccatgcaagtggatcaacatacattgagttcgaccaggtagaggtgcctgtggccaatctgctcggtgtggagaacaagggtttccctgtcattatgaacagtatgtttcccctagatagccacggctagaccaaagccaattgtccctaactcttgacagacttcaaccatgagcgactctggctcgcatgcacatctctgcgcatggcgcgaatttgcgccgaggatgcataccaacacgccatcaaacgcgagacattcgggaagaagctaatcgaaaaccaactgattcgcgcgaagttcagtgcgatggcccgaggcattgactcggcatattcctggatggaacaactagtctatatttccgaaacagccaagaagcagggcgtggatgcttccatgggaggtctcttcgcaaatctgaaggtcttggctgggcagactctggaaaaggttaacagggaggcccagcaagtgatgggtggtcttggatattcgaaaaatggccgcggggcaaggatcgagcaggtcagccgtgatgtgcgggtgatggttgttggtggtggcagtgaagaaatactttcagaattggctcttaaccaggaagttaagagtatgaagaagttgagtaaactctagatattttgctatgttgtttttagttcaaatcgatctcacgtttgctcaaagtgactgaagaatcgttgcaaaagtacaagtcaagaatttcaaccttccagcctttcgatgacccttgggaatagggaattgttgctcgtggatgtgaatttacagtaccgccttcctgatcaggtatcatttataattctgctggagtttaatataaaggcggtatacaaattgggaggcggcggtaggtgctcaaccatattgggaaggcgataccgaagattcaggggggtggaagcaacaattccctacgaatatctccgagggttatactgcttgccttttgggatggaattgaacttgtattgatgaatatcgatcaatgaacatgctaaacaatcgaacaaagaatctttccttcctccaccgcatccccggtcttccaatctgtttgaaacttccctgaagccgcgactgaaatattgacttccatcttcatactctcaataaccataaccgaatcgccagacttgacttcgtctccattctttttcaagactgaaagaactttgcacggcatgggagctgcaacagtcttttgctctgaacccttatttgcctttgcagctgatcgattactctccgcaaatgagagcagagtatcgcgtttgaattcaacatgagttccgatagaggggaaatgacaataaatccgttgaccacaatcgacctgtcccgcgaaggcatgggcccgtgttgaagggatagctacatgagcagtgagctttgatccattcactgaaatctcaatggtggatgtaagccaggaatcgggtagagctgggttgccgtgtgcagggacccatgagataacttggacttggtatgccggagaagacgttgctttgccggtgcgtagtgcttgactgatttcattatattgagcggagatttctgctgctgctgacacctcttcatcggtggtggtctttccattggggattgggaagagatatacatcctcaacgccggatgaaaccccggctgggcttgctttccaaatgcacatcacagcgttttcaggtgccgaatcaacctcctgtccagtctggctaggccaattgaccgtagttgtaacatcacaatggatattgactgggtcgaacctttggtttcggaattgcatgcggacattccggagaggtttgggtcgtgacaaggctgtggcgtaatctggaagtcgtcggactaccaagcttggaagaattgaggcgatggttttgaactcaggcagtccctggaccgaaggaggctgaagaagctcattcaggtgagatggaatgaacgcagttgtatagctaggatcacggaacgccgggttcaataaacatgatcgcatgaaaagttgatttgtcttgactccaacgcaagcggtctgcccaagaacctgagccattttctcaatagcaagcgctcttgttggagcccaaacgacaagcttggcgatcattgagtcgaaatagatagatactgatgatcccgtttggattgctgtttcatagcggatatcgcggcccggggctaaaggcccacttgctggtagccagaggtgaattttgccatgttctgggaagaattccctctcggggttctcagcacacagccggcactcgattgcatgtccattctgggtgacattccccagtgttggaaggcttctcaggctgcctccagctgcaacgaacagttgtaaagaaacaagatcaacccctgtgacttcttctgtgatcggatgctcaacttgtagccgcgcattgacttctaggaagtagaattggttcgtcttgatatcgaccacaaactccaccgtaccagcattttcatatccaataagcttggctacccggacagcagtttcactcatcttttttcgagttgcttctgtgaggaaagcacacggggtttcttcaatgaccttctgatgccttcgttgcacagagcaatccctatccaaaaatgaaaccacatgtccatgcgagtcacccatgatctgaatctcaacatgtttgctgctctcaatgaatttctccaagatacaatcatctgaaccaaatgaccgacgagcctcggattgagctctttccagttcaaccttaagctgtcccgcctcgcggacaatccgcataccctttccaccgccaccagcggaagccttgagcatgaccgggaatccaatctccgtagccactctacccaaagcctcggcatcttggctggatcccgagaatccagggattagggggacctcaggggcatgagcgcgcagataatcctttgatgaccgtttgtcgccgagagtagacatggcgctggggctggggccgatgaagatgagacctgcgtcatggacgcgctgggcaaaatctgcgttttcgctgagatagccatatcccgggtggatagcttgagcacacgttgaaagagctgtttgaactagtagttcgatgtcaagaaacgggttgcgagcactgcggtcaatgctgccaatgttgatggcttcatctgcgtcacggacatggagggaagatgcatctctgggtactcattttagcgattgtcctcgatgatatgttggtagcacaatttctgagcactcactcgtcgacatagaccgccacggatgtgatattcaatttccggcatgtctggataatgcgacaggcgatttccccgcggttggcaatcaagacttttcgtataataggtcttccatctttgcccaagggtggctctgcgacaaataatggcttgcgaagaactgacacatcagtgcccttcggatcttgggtgaaagtaacagccatagtgtgatcgcggtatgtcaagaatgggatttctgaaggttcaaaagaagcagataatcctataggaaataccagctccatcacttcacaatatcaagtgtccgagctcttgctccggactccacaacttcggtccgacatccgcatatgtgtgggggaagccgaacccggaccggtcaacccgcaccacaatctttgcttggccacgcgtaaataaggccaatcgttgcgaaagattgaagatcaaatgtcggggcttttaggatgccttagcaaggagaccgtgggaattaagaccatgcatgattccgatactcttaaaggtcgtccagtctatattaacgtattatagcggccaacagtcggatgcttgattttaatggttttatggcctaattgggactagctctgaccagttctagaccgcctttgacaccgctcaataccatcttttgtaagtagtccgtacgcatttaagagacgacgctgtcactatccatggggtaattcaaatgtcttctacccgctgcaggctgatggcacttcgccaagcggaaaccagaggatacagagagtttggaagttcatacggtcggtgggaagaaatccaggcttggttttctaaacgttttgggccttggtatcggttgcgctatcagcttttctccaggaaagtccgggactacggcgggtgtgcatggctttaaatgtgggagattcatatgattagaggattttaacgtctaggatcgatgaaaaatattatttgaggaggtataaatagcttcatcgtttcaactttcaagtcgttctcaaaaactttggtaggccaacctggaaataaacaatgatcgcgtctattgtccattgccgaaagtcctccgttcgagaatttgcttgcagagttcttttttaagagaaaatctaaaacaaaagaacactacaaaacgcgatagatccaaatcaagacatacagcgagcaatagaaacacggtcgaacaactcctcaaaggcgagagatattcagccagtcattagttctacgatttcagaccgagccgagcagacagtccgagaatcaggacaatatctctcatcggagagctttgacccagcggggaagcgttatttatttcgcatcttgcaaacgaacaaggatgtcgagcgtgtagtcgtcgagtggttcatagtaagctctatccctcctccatcataatcgtccaatctctgatatatgttagaatcgaaccaatattgagagagtggcaaaaaggtttcgacgaacagtttcccccgatccgagatcacacctctcacaatggttcttgatatccactacgcatatgccgcgccctggaatcatgagtcaagggatgtccccggacgaccgatctaacatcataatctggattgcattaggaaagcttggccttgataatggatattctcacatgatggagagtgggcaagacatgagtctggatgggcatgagaaggtctatttttctggtcaagccgggggccttgccgtgtttttattattaaatatgtgacagaatatgagcataattgaaatatgagttatcggcggggaatggcatcgtttcaggatctagctggggagctcgtaggttagatattgatctcctgctagatgacgaattcattggattgtctgccaatacgtctgtcataacggcgcgtccaatgcgcttctacgaaagttcagtccgcatcacacgtctttttcttgtagtctgttatttaaggaagacgatccccttgtccttttaatccttgaactcccaccattgtttgtttggctcattcgacaaacaacacacgtagtcttcgactctgaggattacagcgatcttgataccatcctcgacttctgactgccaagtaagagggaagacatgcggtattcaatggaaggatgaagaatatattgttcattgtgactgaaaagatgtgaactataagttgctcataactggaaagtagggtactactggatagtagaagtagcaaaagatttcattatctgttcctttattcgatagcgccttcaatcttagagatggggagttcaaaaaaaggtaaaaccgcaataacacttcatttcttattctcttgttatagcacatgaacatgggtgtactcttcgtcgtgatttaggccctaccattcaatgacccctcgggccaacttgtccttttcttgactgaaacgtagagattgagtggacggacaagttggaattcgggatcatattgaaccttatcttcgtcatcgagggcaaactcatagcgatatactaattcgctgaaaagaattttcgcctcgagaagagcaaagttgaaaccgatacagccacgtccccccatggcaaagggaagaaaagccgcacggtgacggcttttaaccttatcagtatcccaacggtctggttgaaattgggttggatcactccagtgttcggggttagagtggaggtcgtaaagagcgcaaacaactacactatccggttcgaggcgatagccgccaggcaaaatcacctccgtcttggttgttcgagcgggctgaaaagcaggattgtgaagacgtagagtctctttgacaaacttgtcaaggaacaataatttattcaccaaatccacgttccaatccgtgctcggtgtgacgcccatgtccactagctcctggagaagacggtcttgattgcactcgtaggtagtcaggcaaaagataagccacgacaaaagagaagccgtagttgagaatccagcggacgttaacatggagatgttagggacaatcatcgaacgtggaaatgtctcccccttctcatcggtggcgttgatcaaatactctaccaggctagatgcatttagagctgcattcgccatcggcattttttgcatcgctccatcggatttctcgattttagccacgatttcttcgactagtgtgtaacaaagtcgatgcgattctctcaattttcggggatcaccaaaaggcagatttcggtaccaagatccgcgagaggccacctttttgttgagcgcaaacatgttcaagatcgacatgacgattggatgaaaaggcgcgtcaatttcagccaggtggccgaattcctccccgagaatgaccttgcccacagtctcagaagcaagcttggtcatatactgatagacgttccacgattgcatgttttcggaaaatgtgtcaaacacagcgaatgaacgtcgaacagtctcctgcatcagcggcgcatagtgccgcaccgccttaggtcccatggaagttgggaggtatttgtgagtaagacgccacgtctctgtttcggtatcactgacaaatgtagcgatgttgtctttcacgccccgaaggggatggtcgtcggtgattcttttagtgaagtgcagcgattcgttgagcactatagctgctatttcaggatcatccgtgagataatttgtctttcccatgttggtagtcttgatcaatcctccgtatttgcgaaagaggcgaaaatgattaccaaggtgatctggaaagatttcatagaagctacccaccaagggaagacctttcggaccagaaggctctcgtacaccatggttgccgatcctgataccgataggctcatttgaatctagcacttcaccgatcttgctgatggggttattggacacgtggaaggagacccctgaacgaattagtgtttgttcatcgagacattatccacaatggatcctaccagctggttgaatgatatggaaggaccgagcaacgacggacttcaagccgttcaaatcaagttcctgggcaacttcaatagactgtgccgtcgacgggtcatccccgatcaggaaaaagcttctcgatgccatggtctagcccagtcgttggaatgataactggtaagaaagttcgtgtaaccaaatttagctgtttggggacaggatcatggccatatttataagcctagtcaaacctgaaatacattcatcagtaaccctgcggggtgcgtttagcggtaccattgtaacgaattggattttcggtcgagccttgtaacccgaggctcggataatacagtaattccattccatacacaatattgagggtcgtttcgagtccaaacatgagtaattcgagttagacttcggcaagaaataaaccccacttgcctctcagaccctcagggtgccccgcacgaccggccgccaccttcaccacccccacccttcctgatcctctgagtaaagcacgtgaaattatactttcggataatcactgcatgtattcggtccccacgtatctacaagacgtggctcttagtgaagcatgcttcatggctggcagtaaataccttgcaggcgtgtaatgaggagtttttcgactgaacgttggacgaaacggcactggtaggttcactgaataaacatgggtattttccgtgtatgtgggggacaacaataggtataaagaggtcgtttcatcgctataattcctcgtgtacgaatttaaatcatctcgcccaagtccctgaacttggacttttttatatccgatctcccctggccttgtttgtccttcttcttcctaatggtccaatcgcgcgtgacaccgactcctcaaatggagttgcccagcatacctgcaaacgaagtccagttgcatcgcaaaacgtctgatgcgtggatgattgtgcacaacaagggttagtctccgggtagttgttgaatatattggtgaattatcatcacaggactgacgtaagattagtttacgatgtcaccgactacatggaggatcacccaggaggtgttgaaattctactgggggaagccggaaaagatgctacacaagtgttcgaagatgttggccattcagacgaagctagagagctcctacaaagcttgttgattggcgagatcccggcatctgtgggtttctccattcattcatccacattatggcaaaaggtactgatttgtctgttcaaggaacgcgtggccgaagtggagatctatcgaccgactttcgaggtgatcaatcagactacagccattaagacaaagtctcaaccaagcaatggtttggcaagtttttggtgggctgtcgctaaagtctgtctgatcggtgcctctggcgaagtcgcacgcttgatttatcattatcgcaagcaatggccaggattcatacaagcttcgctgggaggcctgcgcgtatccggaacccggatttggatttcaattggcatggtgtccacggctcagtttcttttgaccttcggactactttcctggggtgtctcgaagcttgatttcaagcaggatatgctttcatttccagcgtacagacgtcgacacccaaacacattctttaaaccttccgccgcccccacttcatttacatgccagcttcatcctcagacttggacgaacctcacactccgtgaaaaagctagaatctcgatgaacgtttatcgatttgtattcaacctgccgaatacaaaacagcctctcggcttaccatccggacaacacgttgcagtccgtgcaaaaattggaaataaagatgtcgttcgatcgtataccccaatctcagacgatcgagaaattggccacgttgaccttttgatcaaagtttatcctacgggtaccatgaccaagtatctggagagccttgaagagggagactgtgttgaattccgaggcccaaaaggcgccatgcggtataccagcgattattcagaaaaaattgtaatgatcgctggtgggactggaatcacccctatgtatcaaatcatccgtgccatctgcctaaatccgtccgatgcaactcaggtcaatcttctttatgccaacaactccgaaaccgacatgcttcttcgagagcaaattgattcacttgcgtctcggtttcctcagaatttcaaggctcactacattctagtgaacccgccttctgggtggcagggtagtgtcggtttcatcacggaagatctggtcaagaagagtgtggtagcgtcacctcaaagctctcgcgtaatgctgtgtggcccacctcccatgctcgctgcggtgaagaaaatgctatctgcccttgacttccacgaccccaagcctgtgtctcagatgcaagatgaagtctttgtattttagactcgagatctactagcttcgagtttcccacgaaaagcatcagttccgtggatgtcaaggaaatttactactagtcgaatttgatcaaacgtttccagatacctgacttgcatacatacttcggcaatattgccgcgattggttgtttcttcgtgaagcgatgatgaagatagaaaagataaagcagaaaatgcgctcccctccatattgagtgaagtcgagatatcagatgcctacaatttatcgacagttggcgttacttaaggagtctgctcatgaataatagtaactgcatatttctttgcggtatcttggtattttgcaggaaatcgtaattgtaaagattattgtcgtttaactctcaccaacaaacgttgttcacagcaagttgaacaattggaaataaaaaagccccgcatgttgggcacccgccacattggggttgtccgccaccaatcccccgcaatccccttctattcagcttcgtttaatagcagtatttatatataacatcgcattacacaagctctaatgcttctatttggatggtactctgctcagcgaattctccggaaggatgagaatcaagcgttttcgctcgacctggggagttgatcccggccagaacctggatcactgggccaaatggttccctgaactccagaaaaagggttacagtatgtttaaggcgtatttctcgttcaacagagtgacagattgtcactgacaccatgcctacgtcctcaggcggggttgaagtaaaagttcttctgctacaccccgagatggatttcaagcgactgaggcaaatctgtgatcaattgggatttgaaattgctgtgatgtatgtgatctaagttctcaagtggataccctcgctgatatatatgaatcagagcgcaaacgtctttaccctccattcttggtccgcgcccgtcaagactgaacgcggacaaccatctgcagagatatcgagagataattagtttggtcaaccctctgaatcctgcagccattacatttcagtctggacagtaagaggctctcggctctcaaggacaatcaaaagcttattttctttctagggatgattgggatatcaaggaatcgatcaagtattttcagaggacaattgatatagacgaagagttgggggtttcagggcgcgtctaccacgagactcatcgaagtcggtcactttgtgcaccgtgggtcactcagtgtatcttacaggctgttccccggtatgctttccctgcactcagaatgacgtgaactgacctgctcatctacgctacagactgaggctcactgccgacttctcccactgggttgttgtcagtgaaagattgttagattccgccgatgacgaccgagccatggttgaagctatcatcccacatgtaagttcagggtcacgcgattaacgggaaactgacaccatcaggtgtaccatatccacacaagaattggcacaacacaagcctcccagtgtccagagcctatgcatccaagttttgagcaagagagactctcattcgaaagattatggaagagcatcctgagcaatcacttcaaaagacatggccacgacgcaaccattacatttgtaccggaatacgggtaaatcgtatttatgtctatgaagagaagacacaagccagctaattctaacacagcccattccattggaagtccgaaggcctacggagaggtcgcggacgaggaaggacaacgtctgcaggctttattcgacgagtttgcggccactctggtcgctacttgaactcttagctttaagtcgcccattgcataagagataatgccatttcagcctgcaagaggtagaatatttttcgtgctagtcaatattgttggatatggtggccttaaggccgcgccctctcggtacagactagattgtcagaaaccaagatggatactatttctgtacagatgactattgttattttaattgaagatctttctgccatacaattcgaccaatacactcgcattaccacgatattccgtcttagatagctaggcagcagccctacgtaggactacttcaagtcttcatgtactatgtatataatgaaatggatagagatattcacccttttcgtcctcacgccattccaagcgatcgtatccgctctccgcagatggttggtcgagtttttactttcaaatcccttttgtgatttatggcatcttactgctaaagtggtgattcgaacgttcgctaccatcagtcctccagggttcggtgaggggctgggttaattgggatgtggcggtttgcgcgcccttggtgggacccaaagctaatctattgtggtggcatagcatctttgagctaaccctgaatcgatgttatatgccttacaaaaggtaagcaaacgagttacttccatctagggaattcccatattttgagcaaggtaaaatactacattcatgtaatcgtacccgaggcttgccctattgagctggacaccaagtaaaagccactcttgaactactccaatttatgacttgtaaggtacatgaatgggttgcagattttcattctactgtatcactttagggggtggggaattgatctgagttgtttaccccagattgtaaaatgcggggtttccccacaagaacttcttcgcgaacacacggacaactacaaaattaagttcaatctagaaccagggctgctgattgtatgtgagaggtgaattgctaccaggataatgtaaaatcatatataggcttgttgccccggtttacaccctactgtacttggacatctttgatacgtgttttcatcctaaagaatcacatcttgaacatttctatggccagtgaaaccaaaatgagcagtgacccagacgcgaatgacaacgtcgacatgatcgagcatgtccgcacgaatgccagcatcgccattcctcttgaggtttttgagaggcgataccttagcctcaatattccaaatgcaaactggtataagcgtctcggtaacccaacacctctgtgagttttggggtctctgattgttttttctcgagctcctatctgatagtgatatagcggacttgttggatttttaatggcagcgagccctttcgcatgtgctctcttgggctggggcggagcaggaggcggaggtgttgcgactatgtaagcgagaccaaagagtgaattcctgatgattatttcaatctgactggctctaacagaggattctcgtatttctttggcggcgtacttcaacttatcgcggcagttctcgagtttatcctgggaagcacttttccttccgtcgtatttggctcttttggtaagttacacggagatcatcacagaggtacttgaaaaaaattgacatgtcattatcaggggcattctgggtggctctcggcgccacacaaacccctaatttcaacgcccaggcttttttcgaaaatggtgaaaatggtgtggatatgagcgaatattacgctagctttggtaggtgttacccagtggaatggacggtaggtcgaattgaccatggctaatttactccagcatttgggctgatcttcctggctgtcctcgtttccatatacacgatttgcgcaacccgccttaacatcgtctttttttgtctttttttcaccctcaccttttctgtgatatgtcttgccgcgtcatactggtgtatggcacaggggaaggctttagctggagaacggctgacaaaggtatttgcatcccgaaagagacccgagattccttgatcttttgaacatctactaatgaaacgtccttcgcgatcaggccggaggttccttgctgttcatcgtttgtttcctagcgtggtactatctggtttacttgatgctagattgtgtcaattttcctttgaatgtcccagtgggtgatctgaccagagtatatggtagagacaaggccaggaaccgtgagtgtgaggggatggattttccttgaaagaaaagtgtggatctaaaagatagacacttgtctttcttagaaaggccacttgatgaaataaccttttttggcttgaaagatacagggaaacgatcttgactgcaactgcctcatattgggaatgttgaaactagctggaaacaaagaagggagagaagtgctcttcaacgtcattcgccgttactcagaaacccaaggccggaaaatatattatagattgattcacaatatatgacttggttttttctgcttttatattttgtgtcactatctgacaattcgaatttagtatcacgggaaaaacttgcgactcactaataccgtttcactctctcacgtttgctctttctacaagatatgtgcttttcattgtatccatttcggaaatataccaggggattcaatacatggtcgaatgtacttcccgatacgaagttgcctgatggaagcagctggtggaaaattggaaaccagagatctagcaaatgagacagttttccatgattaaggaatagcggttattgtgtgacaattgagccatcttcagatctccgcaggttatggtgactgcaacagaggcactattgcaaaatctccgtcacggatcctgtaactaaaatacccaatgaggctcggacgtgaaagaacttcctagacttattatatgacttcaattattagacctatgagaggcttagaaagaataagcacattttggcccgaaactgctgctacgaagccctgatcgaggttttcagcctgagaataattaacaatattaaccagaaagattataacaaagataccaagatctgcgatttctacttgttggaagcagcaaaaagaatgatatctcaacacaaaatgttgaatcctattttcgtcaaagctcactccggaatggctccgtgtacattttaccggtgatcatcaaaacccccattagggtgaatgaggactttagtgtatccgctttccttcttgtcgaatttttcataagccatcgccgcatcagcgaaatcgatttcatgcgagatgacgaagctgggcttggccttgccggtaattatgatgtctcgcaaataccgattataggccttgacgttacactggcctgttctgagagacaaaccctatgagaaatcagtaacttggatctctcaaccaagggcaatgaccgaccttttcaaatagcttgccaaaactaaggctgattataccatttgtggaattggcgtcagatgatcctggatcgctaaagaaaggtagttgatgtgagacggtgctatcaaaatcctcctcgtggcctcttgcccatctccggattcttaccttgggacatagagcccaggaacacccattcctccacaggctcgtgtgacacgtatcatgttctcgaggacaatatttgctttttcggaggatccattggagtcgacagcctggtacccaactgcatcgactgaccggtcgaccataccattattatgactggtaatctgatcaactgcatctcccttggtaaaatcgatagggatacagcctatactttgggcgacctgaagacgctcttccacgcgatctacaacatagacttgagacgcccctcgcaagactgccgaataagcggccatcaacccaacgggccctgcaccgaaaataacaatgctttcgcctggtacaaatccagaaatttcgactccgtgccagcctagtattgtcagtccttaaacaagcttttgtgaagcagaaaacaaaaagcgaagcggggggtggggggtgggatagagctcaccggtagggaagatatctgtatttgtgtgtcagctatcgtttctcccataaatgtaaaatggccaaattacctgcaagtagtatgaaatctgcttcgtgttctttacccgggggtaacagaagggcattgaagtccgcgaaagggacacgaagatactgcgcttgaccttcatcatgacattagagttaagactcctggcctctgcgtcaatttttctgaacttacctccacgataagggcccattgcaacgtatcctgccttcgaggtcagccaagtaggtgatgtattcaattcttatattttaccgtatgcgcccccggcgaacccgggattgactccagtacaaaaggctgtttttccttcctcgcaattgcgacaccgtccatcggcaacgttgaaaggcatgacgacacgatcccctttcttcagaagcgttactcctgagcccaactcctgcacgattcccatgttctcgtggccttctaatattagcgcttcttctctactgctataccatcagatcttaccgaatgtgattcctggtttggcagcagttctgccctcatacatactggaggtgttagaattgagcagcatttcacagcatcttaggtcaactggtacacttactgcagatctgagccgcaaattgccgccttaatctctattagcgattttgatcttctgaaccaatgcgatataataactcacagacgtaattttgacaatgatgtcatctggatgttccagtcttggcttttcaacatcttggacttggacgtcgtaaggcccgacgtagttcaatgccttcatagtagtcactggcatcgtgttggaagtagtggggccaccgtagtagaaattagatctcgaaaatgagattttaaacttcaaacaaagacatcgggcggcttttattacatcaactgaagacaatcgaggggtagaagtcaatagtccaggtggatgggcattctaactgaccccacatgggttttacgacaagaatgtatatccgtgaggggtagtcctatcaaacccaccccacccccacccccacaccaagtaaggtcatcgagttgctgtgaaatgggtactgaagcaagagctgggattatcggcttagaatgccgaaagattctggcctaggacaactattgaaggaagttggatatcgatttcggaagtcgtaatggaatgattcggtctaacattctatgccttcttccaacatcagtatgttgacgatcctacgctatccataggtgcattggacccgtcttgtagcatgtgtattatggctatattattatagattttttggggttatgacctagtattatagacacaggtctaacactaataaataaatagtgcgtattttgtacggaaagaacagctctcaccgaagctcaatcgtcaccttgccgtggaatggcaagaactagttctcttccagaagatcagcatatgccctcaagcttgcactgacaacatcgacgattccccagcatagattgccactgaagcttctcgtccagactcgaatgattgaacagctcagttgcctcatatttctcgggtcttttatcaattccagtcgattttctatagggagtttgattcccaggtcagtctcatcaagcaatcgtgtgatccatagatacagctttctctcgtgacttggcaatcttaccagtcccatattagggagggaccgaagccacgttgtcaaaagatgagcgtattcaagagcgctgagacagtgctgtacgctccagtgaaatgaataagttcttgctacgaagccaattccaagctgtatgggaatcgacaaagcatgaactgcatggagaagtgctgtgataaatccaggaccacgcacaacatcattgggtgcaccagccagggcctgtgcgattgctgaaggatccctcgtcaccaaagcacggtggggtccaagatcaatttgcagtcgcacatagatttgtcccagaagtgccgctgaagtgaatgcaatgggaccggagggattgcgtgggtcggtgctggactccggtgtctgcttccaataggacttccatgtccgaagcacggcatccattccggttatgtgatgccgatgagtcccctgctccagtggaagccgacataactgacgagcaaagaaaagttgctgggacaaggcatgtaagagaatatgatttccaaaagcagtgcaagccatttcaccaccggctgagctttctttcgccttaaagagcaaagaaatcgattcttggaaacatgaatgctttctgttttgggccttttcgtacaccagtccccacgcacttgcactttgcgctgtccagacttcggctgagcagggcatattgagccccagatcagaattgagaatcaacgggggtgtgttatgcataagggagtggaggttgagaaaacagaaaacgacgaatttcgttcgcctgttagattcttctttggcccaacgacaccagtcaacatcatttgtgcgatcggtgatttcgaaggccggtttttccccaagcccatggacacggacgagcgatgcaagattaccttgcagagtcatcgattcttgtgccgccctagcatcgcctccccaggttgcatggatgaccagcagtagaattgcctgcatagcctccatcagctcggcagactcttgctcagagcgatcgggagaatgcgaccaaaatccggctaccccacggcaagtggaaagcaacgagctcgatagaaggtttggtgacgtaccataacttctttgtctcaggatctccaagattattgcttgtgctgcacaaaacaaagtcaacccttcttcgccctcaaagcggtactgtgccccacaggcagcaatggcaagcacaagcgctggattgcaacttccaatccgcagcgtcggggtatgaataaagggaaggtgctcgttgaggccatcgataaaaccatgaaaaaaccgagataatttgaactttgaaggggcagagaaatctccaggcaaaacgcactggaaatagttcagcccttttagaaaagaccgataatcagcctcgcggatattccgagtgagctgaattccgatggccccacctgacctttgggatctgtcttcttgctcgcccgattctggctgcaaggacggtagacgggacccgaaattagataagaagttctcttcggggacatgtccgtgtgatgaatgatcctctacatcatctgtagtggttgtgtcatttcgaaattccgtttgtaacgcagccacagggtcaaatggcaaaataaattgatcaattgattgaagtccatcgggtgcccacccttctgaaaagccgatactttcaatgaaatcggcaaaattttgcattggatcttcgattggtttcattattggacaaggtatcgactcctagacatactcataatcagcatgttttgtcactcttctgatatattttcagagcctgacctcatcaaaagaatcgagcctttgtacgttggaatttgcttcagtaggatgctcccaatccctttcacgtatttggagtgattgctccacccaaggcaacatgttttggctgtgaatagcagctattgagtgctcagctggaattggcataacatcaagtggggtttgtcttcgatccgccagcccctcattttgtccatgtacaagaagaggtggtggtgggtgtacaagtcttttatggcggatcatcaggtcactaaacacaattagaacctgcttggaagggcaataggcttaattgaacgaactttctgccaaacgatttcgaacatatgtcacatgagaacggcttgtcattggtgtctgtggtgtgagtgtcagcaatgattcaacctgtgttggcgaagtgaacggcatacgacttctgacgtgccgctgcaggtgttcggcgcgagaaaaagaacgctgacaatatgggcacaggggcggcttagcacggcccttcttgattctcttgggatctttttggcccggcatgacggtggattccatgatatgaagaccgcggctgagccagaagggtagggtccgagtctcaggaaacgtagttatgaggggcagtggggacaatttcgggagataatcggtaagggctgcccaggtggtgaccccgcattgaccgcctcccgaggttggttcggggccttgagaatcgtagcacgccaactgaacgtctgctccacgaagagacaggggtcagaggaacaaaaagtcgcgactatccgtaggaaagatgtaagaacttgatatcacctgccacagggcttcgaacaagatattgttcgcgaataataaatggcgttactagcaacgactggatggagacgaacagtgcatagaacattgacacatatttcatccccggtggaaatcgagcatttattcccggtcggatcaaatactgtttcaagttcagtgggccaagttacgcaggacactgcctgatcatccagcctggctggtatccacctagcgtgtaactcgctttggagaggagacatcgatactgccatcgccagtggaactaatgttctgactaacccggatttcacttctggacttggccggggtcacttcctttcgcgaactagaaattgcaaaacatttgacgatgacgccgatggaaattgccgtggcgagggtattggaatagtcatcattaagcgccttgacgacgccatcgccgacaaggaccctattctcggtgtcatcctcagcgcttccacaaacccagtcggagtctattacccggcctcactccggggcccagcgcgcaatcttcaagaaaatcttgaaccaagccgctgtggatccatatagcgttagctatgtagaaatgcatggagcttaactcacctcaacctgcattcatgaaacaatacttactatgatacagaggtactctagcgggtgatgccggtggaatgatcagtgtcttggatacttccgccccgacgctctcggaggtctccaagggccggacggaggagcaagctctctatttgggctcagcaaaggcaaacatcggccacggtggggcgtcctccggtgtctcggccctgataaaagtgcgtctgatgatacagaagatcatgattgtccctcactgtaggatcaagacctaaaccaattccaagttcctgactgatctaggagagcgaaatgtcaatatcgctctgaagccaacggtgtgggagagaagtaccgacccttccagacctcgccgcgtcttcgtgaacaacttcagcgcggctgttggcaactcagtactcttgattgaagacgcaccagtccagaagtagctgccccttattcatattgatcccaaaactgtgtatcttatcgctgtgtcgcctaaagctggaaattctctctagggcaatctgcgctctctctttggtcacttgaggtagaaccctgaagtctctttggtaagctttcatacactactacaacccgtcggatatattataaacattgttttatacttactagctcaaatataactgatatctatacccagatcgacaatatactataggatactctgggaataacccggctaaagaatgccccgaaggtagtattcaccttaagtggccaaaggaatattcatgcattggtcgtacacttagtactatcattaaagggaaatgtataatatcaagtaggccgggtaaagttttattagtattgtattgtcccacttcggctgccgtactcaccccaagttactccgtacaacataaaattttagaaattaagcttaatgtgacgatctgccgacttatgccgactgactggtgcacctgcccaaccttgaaccgcgacctcgcacttaacattgcggtcgttcctttctaaaccgtaaatgaggtcggagtttgcatggcttatggcaaggtcgctaggaagagcacaaaacccagtcgaggagatcgtagattttctctttccctcctttatacttataatttggaattgattgtactcttttcttctggaaagaactagcatgtaacacttaaggagacacaaggacacttgatcttgatatattgtcagaatctgggattaataccagaatgaataccggcatttttcatcatagatacagatgggtcacgtggttgaccaggctagtctctcgttatcggcagggcagtcttcctctccactctagcttcttgtttcgtcaccggcaacaataccatctaattgctcgcgctgcatgatggaatctgcgcctctggcgtacgtgccggtgtcagagcgaagcctctcccgtattgctcctcaaattcgcgagtcatctcaccttctgccataccgcctttgtctagagcggaaccctcttttgacatgggtacttcgtccctcggccgactggaatgaatagccgtaaggtctcgtgacaactgctggattgattcgttgctcatatagcctcccacttgcctgcttctccaaccaaggccccggttctttccgtgaagaacttgaccatttgcggagaccataaattggagagcatctccagtgccgtgattttcgatgatactgacgttctcctttaagtgatcatccgcccgtgagcaaatttcgaggcactgccgagtagtttcccactcgtcgcgcaaccttgatagatcttgagcatcctcgtcagaggatattgctgtccttgattttgcgactagtcgatccataatagctcgcatatgcttttccaacttgtttgccgtcatagccaagctatttttgcattcttggagaccttcatttgtgaccgttgccggtgacgcttcagatccggctgatcccagagatggacccgcatcgtcggacatcagttgaatttgatcgatatggttcgacagctgagcgcaaatctgaagacacttctccgtactcaagcgctcctctcttaacgaatgtaattcagccgcatcaggcccagactgagtcacatcgttcttagccagctcttccaacttcatatcaatactctcaagccgagctcccagatcatctttcgcatcttggatgaggctctcgtagtccccaatattttcaacagcaccagcggataagcgcctcgtaagaattagctacttgcgtaaatggaagctcagaaatgaggggggcgacgctgtaatagctcaaggtgacactcacaggtttacatcggttaaggcaatatttatagtggctttatatcccgccagcaagtcgcggaaatcgtcaatattgttacccatgtatgtcagcctggcccagtcccggaagctcgtgccggtactgtctgatcgcgatgcacatttgagaatctcctgctggaactcttggcaaacattaccgcatcgcaatagtggcaggtctaggcacgagagatcgacactagagttcgatttcaccaggtcgacgaggggagccagcacagcactgagggcttccagctcggcgagaaggtcgcgcacccgctttggatgcgatcggaagccgttcactgtttcatagagtgagacgctacaacgaaaggcaaatgtcgccaaagcaaggaccccggaggccagcccgatcgcttcagccatattggaatgaaggacgtagagaagttttcaggggttttcaaagcttaggtggcacacttatacttatatatagaaatgagcacaatgtagcgtcaagttgtaggcgccaggtttatcttgcaatcgttgctctgaggtgagggggcggggcagcggctactcgaacagtgaggcgggcgaagcagaattacgtaatagtgactaggtgccttccatgactagttacacgttaactagttactcggttgtccaaaattagattatggattcggcccatgcagctccgtaacctgtttccacaagacctccatgacacgtcaccaagtatgccacggtgtctcggggtttcattggatttaaaggactcgctctgtgactcggactgccggctgtccttcctagacaggcgttaaatgctgtgaagctagtcctcatgtaaatataaagaaataaggcacggccagctctcagtctggcgatgtgggtccagggtcggaaagcttgcctcagccaaaagatttaggcccgttgacttcgggccaagtacccatagtaatccacataacacacaactttattcccagatcaagataatcgaagtttatcaagaaactcaataagatcgattgtgaacagcctcttttctgtgattcggtcgatgtgagacgtgggaaaatacaggatatagttagggttacctcccattaaacttgtacagtggctactttccgcctgctgcactcaggagggattcgcctttcatatatattcctgagactctgtcacagcttagtcatagttagctagttagcacccccaacaaggggttcataatatcatcatcttccccaccaagcttacttgccacatttatggtagcacgtcctggtttcatccagagttttttttcttccgagaggatctctctcgggtttgttttaacaagttcgaccacctcaggggttcccctatatgccaaggtcagaggtcaccaagcctggcacgatcggcggtcgcccacgctgtcgatcacagtgccaagccgctacggtaaggctgtcgatcacagtgccgagccgctactataacaatccatggacaagcgtactcgtcgggccacccagcttgcaatccagttcgacaattatcgccaggaggcacgcccctggtcaggtgatttcgacgcagatatactttcccgcgttatcatcatcctgaccccttcacctaccgggcccgccaatccctcaacctcgccatccacttccatcatccttccatctttagaggatccatttccaccttcctagcctatcgacaggtctatactcaataaggccgttaaggatttcctctatctaacgtcttacctcgccgttctaagtcctataacccctctatcaagtgagcctgcgtatccgctcgggagaccccgacctaagcgaactataagtaagcctcctagttcaccggcttctataccttaatcttcgacatctgtatcagactaaccgactgcctaacctactgctataatatacctttctataccctagtctttaacgcctatttcagactaaccgactgcctaagctactgctattatatactacgcgtataggcccgctactatatgatagcaacctcgttttagtccccggccaaacagttataatagtaagtttttccaaactgaggacgaaaattctgtaccataggctaaggacagccacatagaccttctataggataactaagtggaagtctagtcttcggaagactaataagccaaagtcgactaagtagaagtctagtctccggaagaccaataagccaaagtcgactaagcggaagtctaatctctagataactaataagtagaagacaactaagcggaagtctaatctctaggaaccgaataagctaaagacaaccaagcagacctccactcttataaggctagtattaagtacctaaccctagaacgacccccagtatagttaagagtacgattaactttacatttttacaatagtaaggctagccctatagtaggtctatcgagcctactataggaagctaaactctctaatctcctataaaaaatagtaaataacggaggtctaggtcctagctataataatagaaattagggtcccggctatataggcgatatattaactctagctacttccctactattacctagtttcgatatagtatagtttatagagcttatcgagaaagctatacagataagccttcggaataatactaatactctttataggccttaaggtaactaaggtccctagggcgagtaaggttccctaggctaattagttactaccgataccttatagaaagtatctaaaattggtgtttttaatcctttaaagagttttaaggatagaatagatatagtttaaaatctttatatctactccgatatatatacgtttatagattatataatagacctaatactcctaaagttagaagctattatctaagcgaatatctatagctacctataaggtaatgcgctccgatagtattcgtaggagttaactatagataaaaaacgccttataaactaggttctactctaagatagatggttttctataatatcgcagcgttttagacctaattataccgaggcccttctctagcttaataagtatatatataaataggataatgtatactaaggctgtaccctaagagaatatatatagggtatattatacctatataaagctataggtataatagatattcttaactagttattataaattcgctagaacctagagcctatactttattacaatatcctagagctaactaagactaccttattagttacttttataaatagccttaactactactattaagactagaaagatatagtaattaagtgctagagttagttaactactaggtttagaaataataggccacaataggataatttagccctatattactaataagactagcgctaaggctacccttagcgcctatatagctataaccgcttactagcctaagactattaaggtctaccttaaagctaggccagatatagataataataggctctagcgccctatagctaggcttagtagactccttagtacctatactaagctataggagcctaatattagtcctattagtattagccctagaacctagtataaagtaactaaggcctctaaaccttttagagataataatatttatagtagggagtttaagcttagtagacctagaataatcctagctactaatagtctagctgtaatagctctaggaactcctagtatactatttagaataaaccttagtagatatactatatagatatagatactaactattattagttaaataactacttctaagctaataacaatagcctaaaggaatattaggataatgtcctagttaataacgataattaataggatttcgaagacaacttttacactaataaggacctatatagtataaatttcgctaaccctactagcctataggataataactactaatctagtttttaagcctaggccaatctaccggtataggcctagttatatatagtcgatagtaagtactcagttacttatttatcctatttataggtttttaagttaaatactaagctgtattagtatcttaacggctgtaagccttaaactactaccgctatactagctaaagctatcgctaatttcgcaaatcctgcttattatattatctactcagctagatagaccgactatatccctagctatatatttcgatcctagtaatatataatagctatagttagacttagaagccctagtaagctaaatacttattaccttaactctagatatattataactttaatcgatttaaagctagcagtattactctaatacccctagtatcctattagcctaattcctataagtaggatcggttcctaatacctatctaaccgctatattattatttaagtttacttcctaaataaagatatagccgcagagctataaatcgaggcctatattatcgaagacctctatacctagcttcttattaatatagatattctaggactagaggggtttatactcaatttcctatattcctaaataattattaagtcctataaaaacctgacttttcctattaccctttatataaaactatactatataagtaaaagaccggtctatatttcttctaaaattgaggtccccctacgctaggcggcacagatccctattattataaagtcgattttactaaaggattataactttatttttaagctaggtaatagtaagtttaagattctagtatagatagttaacactggttttatatatatatatactgttaataataccgaccgaatataagtcattaggaagaaggattgtataggctaacttttagagctagactttatatctacctactaggtttctactaaggtaatacctctagtattatagccctaagcggttaagtcctaccccctattaattaattaagatatttataactctattactgtctacctagctactattaataacttaccccagctactagatagacttcctaatagacttcctaatactatttttatactagatatatagaaagtcctactaatatctatagcctatacttagctaagatatctactagaaatagtactacctaatagtattataatctataggatacctaaaatagctgtagtactctgcaatatttataagtaatataatatttagtctaaccctagcgttatagatatcctataagataaatagataagactcctaatagtccctagtttaaagctgtaatatttataagtctatagataggtaagagaaagctaataagttatcgataatatatttaatactctatatacttaaggaaagatattatttactaaatactaagcctaaggtataaaccctatttttattatatagaaataggttacttatatagataataagggtaacgctaagctctaataggttagttatattatagtcgataaccgcctaataaataaaaacttagttctagacctatacctattactacgataagacgagattattactttagtaaaaggtaagtattttattataattatagatatagtaaaattcttctattaatagtatatctatcccgactattatagctactaagctattatattataccgcggttaagaaattctctatattattactataggtaatttaaactctattgcctatatataatactagatagataatatattccgtatattttaagaatagtattaaacctatatcgataatatctttgtggttagtaatatacttaataagtatattactaaactctacctactatttataaaactagaggaatttaatattactctaaacctaaagaaagtatatattaggtttctaagtttaaccctattaggtaaggatattaactccacaggtatattaataaccgctaagaaggtaaaggtaataaccttactagtttttctatatatatataagtaactagaaatataccttaaaataataggtaatcttcgctattatattaaaagctatatatagaaatcggaactactctaagtctataagataaacttactaaaagagagcctaattaaaggcccctagcgctaagtatagagtatataagctattcttaataaaccctcctaggctaagcttaagagtttttatctactctaggctaagttttataaacctaaatagctagtatactataatcctatatactagctctatattaataccaatagtttaaaggaaatagggcacagtactataatctattatataaagataacatttacttataaggatgttttaaagctaccccctattatagagatctagccgattatattccttagccgacttcttatagatatagagaagaattattagcctactaagcttaaggtttctaccctctactagaccctctataaggtatatcacttagtagagacctatcctagcgaccttctagctatagtatatactaactatagtagtattataggtattactaaagtaataaacttaagttctatttctttagaatactaaaatcttcgcctagtctatatatcctagtttatttaatagttttacctatatatcttctatagactaggaaaaactaataagatcgctaacactctttcctatctactatatatagacctattagtccctagtatataagataatcttaaggatatcctagcactattcctataagtaggatcggttcctaatacctatctaaccgctatattattatttaagtttacttcctaaataaagatatagccgcagagctataaatcgaggcctatattatcgaagacctctatacctagcttcttattaatatagatattctaggactagaggggtttatactcaatttcctatattcctaaataattattaagtcctataaaaacctgacttttcctattaccctttatataaaactatactatataagtaaaagaccggtctatatttcttctaaaattgaggtccccctacgctaggcggcacagatccctattattataaagtcgattttactaaaggattataactttatttttaagctaggtaatagtaagtttaagattctagtatagatagttaacgctggttttgtatatatatatactgttaataataccgaccgaatataagttattaggaagaaggattgtataggccaacttttagagctagactttatatctacctactaagtttctactgaagtgatacctctggtatcgtagccctaagcggtcgagctctgcctcctattgattaatcgagatgtttataactctattactacctatctagctgctattaataacttatcctagttactagatagacttcctaatagacttcctaatactatttttatactggatatatagaaggtcctgctaatatctatagtctatacttagctgggatatctattagaaatagtactacctaatagtattataatctataggacgcctaaaatagctgtagtattccgcgatatttgtaagtaatataacatttggtctaaccccggcgttatagatatcctataagacgaatagataagactcctaatagtccctagtttaaagctatagtatttataagtctatagataggtaagagaaagctaataagttattaacgatatattcgatactctatatacttaaggaaagatatcgtttactaaatactaagcctagggtataaaccctatttttattatatagaaatgggtcacttatacagacgataagggtaacgctaagctctaataggtcggtcgcgctatagttaataaccgcccgataaataagaacttagttctagacctatacctattactacgataagacgagattattactttagtaaaaggtaagtattttattataattatagatatagtaaaattcttctattaatagtatatctatcccgactattatagctactaagctattatattataccgcggttaagaaattctctatattattactataggtaatttaaactctattgcctatatataatactagatagataatatattccgtatattttaagaatagtattaaacctatatcgataatatctttgtggttagtaatatacttaataagtatattactaaactctacctactatttataaaactagaggaatttaatattactctaaacctaaagaaagtatatattaggtttctaagtttaaccctattaggtaaggatattaactccacaggtatattaataaccgctaagaaggtaaaggtaataaccttactagtttttctatatatatataagtaactagaaatataccttaaaataataggtaatcttcgctattatattaaaagctatatatagaaatcggaactactctaagtctataagataaacttactaaaagggagcctaattaaaggcccctagcgctaagtatagagtatataagctattcttaataaaccctcctaggctaagcttaagagtttttatctactctaggctaagttttataaacctaaatagctagtatactataatcctatatactagctctatattaataccaatagtttaaaggaaatagggcacagtactataatctattatataaagataacatttacttataaggatgttttaaagctaccccctattatagagatttagccgattatattccttagccgacttcttatagatatagagaagaattactagcctactaagctcaaggtttctaccctctgctagaccctctgtaaggtatactacttagtagaggcctattttagcgaccttccggctatagtatataccgactatagtagtactataggtattactaaaacgataaacttaagttctatttctttagaatactaaaatctttacctagtctatatatcctagtttatctaatagtttcgcctatatatcttctatagactaggaaaaactaataagatcgctaacgctctttcctacctactatatatagacccgtcagttcctagtatataagataatctcgaggatatcctagcgctatatatatttaaataacctatagtagactaacctatagtatacctccttatagtatcggtactctagctaagcgacaatactaaggattgtatcttataaggataccagttagatactcactagttagccctaatcgatactctagaaagtattaacgcctagtaggatccctaagttaagaagttaccctactacctagagaatagcttgattattttcacaaattctaatagcgaggagagtctatatctaccccaatctataacttaggaaattttcaacttagtttataataagtagatatactagggtttcgacagagcttagtataagcttcgtggtatcatattctacaaaggtgctaagctcctaaagcagtacattaaacattgccctatctatttagagcataggatccgccgttatcgcccatacggttctctctaactaatcatcgccctaccgatacccttttatactatttgttagagggcggtaaaactaggcacaatgcttcgtcttatgctctcgaggggtcaaatgcttagtnnnnnnnnnnnnnnnnnnnatataatatagatagggtatcctaactagtaatagtattattaactagtcgtctattattaattaagagcgatcctatgattatatagaatagggcttaagccctattatctattatcttaaattgtttatagtcgattttatattcttatcttaattcttactagagagttagttaatagttatttagattaactattgctttaccctaggtaaaagtcttagcaaagataggataaataggtttatttagtattagaagggttattatttcttctaggttaacgtattcctatagtctatagctaatagcaattaatctgatatatatatactagactaactaattagattactaacttaagataattataggtttcgcttctgttatagtagcaaaatcggatagaagagagattagatgaaacaaagatcagatgaaaagtcgtcaatattggtcttaactctcagataaaagggttaggccgggcttataactgttggagggcggtaaaactaggcacaatgctttgtcttatactctcgaggggtcaaatgcttagtgtttaaatagataaacaactaggcggtcaaaaacatgagatcaaagtgtatatttaggtctaaaatagtcaatttgtctgatctggtattctatacaatctggggctttcttatacaaacattgcggatagctcggtaagtactgagatcagattgatcttataactaactagatgatttcatgatttttcgatcagatgaaatcatgactttcatcagatgaattcatgactttcatcagatgatttcatgactttgatcagatgaaatgaaataggataaatagtgcaaagtaagcaaacaatcgaatgaagaacacatattccaacactattactttagatctaatcgtcgcaatgcctatttcgactaatagatataacgcggctataactataactgataagtttactaagttaataggaatgatacctggctgcgtagactaggacggtaaagattaggcactgggtgctctctctttctggtagatagctaattaggggattcctacagtgattattagtgatcgcgaccctaagtttatatagggcctctagaaagcacttttcgaccttatctatactaagttgttttttactactgcctattacctataaactaatagtcagttagaacgtactaactagatagccgaagttactatatagtacgcaatcgctacttaccctaacgaagattagctaaacctattacctgccctctaagctatactaaatagctcagttagtataacaataggttacttaccttataaactcttatatagtatcgaactacactacccttagtcgcttttacactaagctatagctcctaatattattatatatatagataccgagtattctactacttaggctactatatatataaaacgctaatataaccgctattataggtagattttttttaatatcggtaataaagtctatcttaagctaggatatagatataatatactattaaactaagttttactaaggtaactacaatagcgttatatcaggtatttcgaagtactcgaatatattaggaaacttacttatcgtttaaatatcctaactaagttaagaatctacctagttattagtattatatacctagaacccgtcctagatagtaacaatccctaggagcgctaactagataataaatactacctaactatagataagcgtttccctaaagatattatctataaggtcgactatattcttactaagtatattattaatatacctagttaaccctattataatagtactaggtattaaatcactaagtatctaatctactagaaaggctaatcagctagggataactattaggtataggaagaggactgtattagatataataaggctattaaagactttaaggaacattagggcgtactcctagtaagctcctaagtactatattttccttactttatttttactttccttttacttttattactatctattcttactaccttatattacttaactcttacttctaactcctacttttattctaatttaagtttctaactcttatttaactcttacttactactcgatatacctattctatttttcctacctctattacttctttttttatattaaccattctctttcttatatactagacttattataccgaaaagaaaggcactcctataccttagtctattatagggagcgactgatatactttaccttctgggatatatattcaacaattcctatataatataatcttataataccgcttatactaaactagaactagataggctaatctagactagtaactaggtcccagttattataggtagtagactatctctataagatatcgcttagttacccttatatataagatacaagtataatctaaaaggaaggctagtactacctaataaccgtaacattctatctagaatatatattcaacaattcctatataatataatcttataataccgcttatactaaactagaactagataggctaatctagactagtaactaggtcccagttattataggtagtagactatctctataagatatcgcttagttacccttatatataagatataagtataatctaaaaggaaggctagtactacctaataaccgtaacattctactaagtaataagcttatttatatagtaataaaagaactgtcttagaagaagtatactaagttctatactatctaggatactaatagtaaactatatactagtagaatactatagaaccctagcctataaattaacttctatagactcttatatatactaatctagaaacgttactatatattcgttagcctttatatagccgcaaaatatagctacctaatagtcctaaaggtagatttaaagcttaaaatcgaaaacctagtttttacaattagacctattatcctaggttatcctttcgcagaggatatagttactaacctagtagcagtattctaagcctactatactaaagaataagccgaatttctatactcccgttctatggtatactaattatataactactacagtcagtatactatactctagaaagctgaaataaacttaaagatactagatatcggcttagataattaccactatatcgctatactcctataaggactaagaccctcctatagttttttctaggaattctctatatagtctcctttatacttagctaaagtactatcttttactttctcctaaatagacctaaaaaagataaagattatagacccagtttaatacttatactagaatataaattatctaacttagtctagtcatagtacttagtaagaatactagcccactatataggactaacctagcgacataattagcgttagctcttccgttccgttctctttaccggatattcctaaaccttaaagctaattaccagctatataaagccaactgtactaagctaatactaaggaaaagatcctccgcaatttcatccttccctataaaggtataatagagtatatagactaggtacagccagagatcgagaatttaaaaaggttacgcaaacatatagctagatattactagctacaactctaagaggccgctctaaccgagaaaaccaaggctgttactactagtacccttataataatctcgaacacacttagtagcttcccggatattcagtactaagctatcaggcgctaggaaaacctcttctactgcccctactaacttcaacaaagcgctactcctgacgaccaagcctaaccagagagcccgatactgctagacaataaagaacgtaaagcggctaccgagggtccaccgtacgaccccaggcgtgaattcacaccctcggacatctacactccgccccgggcctgcgataactgacggcgcttttcgttttctcatcattttttcttttttattcttattttttattgaaatttccttttttctcagccggaggccgagattttttgagacccggcatattgttacagcttagtcatagttagctagttagcacccctaacaaggggttcataatatcatcatcttccccaccaagcttacttgccacagactccgagagaaaaagcccttagaatgcgctttcaagtgactagttttgacaagaccgaagaaaccatgactaggatggcaggcggaactctattactcctaagacacccagataacgaccggtacataactcccgggggtggaatggaactggaataaatcgagagaaacataatcaaactcctaacactagaacaacatgttaggcatttccagcctactgacccttagggggaatcatagcaaagttctggtttccgtttgcctcaaagtagtgtccatctgaaatcctttgcgagccattagcgtatacgttatattgtcgaccatttctgccatattgagaagcatcgcgaggtttgtcggctggtggttgcttggagtgatgtctctggttcatttccaggtctctattccaccgacgtagctctccacttacagccacaaacccaggatcttcaacactgacaaacttcggcatatccatatggtttctatgtataccaatgaagatttgaccgggcaagatggccgaatattgtggcacgacctatttcttaggtgtcagcaatgaaaatggagcctgaatattttgtctagcttacaaaaccaacacctagcacgggtaactcttcgtaaaagcaagtgacctcaatcggtggtgtttctgctgtgctgtgtgccttgatcatcgtgtgaaagccatcttggatccgcgcaagaacctcagaatcgcgcttgaggacatccacaattttggaattcgtctgcttaaggaggccaatggaccgagacacgacctcagccaatttggcaaatgaagccccatggtgtggcgttccaaggaagatgataccacgggtacaatcgaggatgttgtggagatgtggttccggtcgttgccttgactgaaacaaggcctaccatttgcattagtatcatttcgtcagtgtcttccactcatgtaatgcgatatcgtacatctttgcagactagtccacccaagctatggcagacaaaaatgacaggtcgttcattctatttgtatcaacaatcagcagtactagtggatcctagaattggttgtcttaccgtgtcgctgctatctcgatacgatgaaagagatgtcagcagattcagggcatgattgcagatgaagttctctgagactgggcctcgccaatcgaccaaaaacgcgtcataaccgaatgtgaggacacgagctgttgggagtatggatggcaagagactttcgggccagggtgtagttgcaccttcggcagtccatgtagcttcacgatcaccagtcaagccatgaataaacacgatgctatgagaacattagaaaggtttccacaacgaataaggcacgcactcaattgtcccatcatctgggttacagagcgttttgattccgttggggaaggacttcttcggctgaatctcaggagtagaattaggagctgaacccggttgtcgtcgcccaaaaattcgcttggccctagtatagttgaaaaatgtcatcttagatcgttatagaaaggattcctggtcgtgcggtttgcgatataagactgaaaggatggcggtgcatcggcgagattgcattatagggccaattttcattccaacctaatggcatctgctagtgtattgcggtcaatctaagcgccaggaatatctattttcgcctgaaactcacgacgtgggtcctttcttatctcgtcacatcgtgaagacatggtgtgcttatatttgctctcaattactgctggggagatggagacaggctgtaagaaatcagaaagccaccgcagctcgtcgatcctctcccccaggacaaacgtaatactatcaaagatgtactcctgtctgcccagaatgttggatcaggctacagaagcacggagcgggttagaatgagccacagcttagtggctttcaaatccgatttggcgccgctagtgatgaaacgcatttgatgccatcattgcccagcggttacaggatagcgttgaatggttctgctcaggcgcatgttttgcaggtatttgatccaactttagattcaaatccggctgagaaaaatggagtttctttacatgattggattcgcttattatcccccaacgtgctaggcagggtaaatcagagattgtgtcgcactgggggctggatacgatttctataattagcaacatgcatggctgggggtttggagtgtactcgcgctacgacctgcatcaaagaaaatctaatctgctttgtcgatccgatttgtcaatccattcagaattgttccaccctcgtacttgtcttcatatccgatccatcaactgtgatccaggcccagattcgttgtcacattagccgcccagaaaaggggctgtgccgacgtatcagaattgaaaaaaagcattcataatatggtgccaagtgccagccagtcaaccatatggaagtgtctatcaaaataccttcatgattggcgttataaggaagctagcactgtacgtacgcgccggggtcgacggattaggttattgtgttgcgtcgtcgtcatttcccgcaggtgggggccgcacggaccatgattctgccactgcacaccgtggacccagggaatcataaattcagcgcggtgaccactgttttaatcctagacaaagaaatctacactctctggcgggttgggtgaatgctcttctcaataacagaccgccagctctacgcccagcgctttgccttgcctttgacgaagaatcacaatcagtgaagcaaaaggattcggcgcatcagcaatgtaagaattaaatacttctgattctttaaacttccataataaccattcacctagtatcttggtcagaatgtcagatattgagatcattcgccaaattactgacctcattggggtcacagaaagtataatggtggcattcggctctatcaaagacctctctagcttaccggaggcctttcaggaagccatgagatggcttcctcttgttgaaaacaccttgcgacatgccaaacgcgcggcggagaaattgaactctaccgaagatgcccgggcactgaagaccgtcctgcatgattgcgacaagaaagccgataatatactggagatttttgagcaacttggtgaaaagtcaaacggagaatacaactcgtccgtgtaccgctgtatagttatcaagcagggaaaacagcgtgtggagactttgatggacggcattctggaggacctaggaaccttggttactcacaaggcgtttctaggagaaatgcacaatcaaatcaaccttttggcgaaggctcgcgaatatctggcgggagtttgtccctcgctggccgattcggatcttgccgatcagcccagggctgccaaccaatacggcgagaacagtcgccagtacaacttgttcggtgaaggcacacagagaatcgctgatggccactatttcgaggcgaaggggaatcaaaattttggtatatttccttccaaggagtctgtggagaccagatagcggttatactgggcggcggtgtcggtgtttcttgaggtgtgagatatcctacaatataatgttcgcccggttaatgaacaatattaaacttatgttccttaagtacggaggcctatggccgccatgggtgacttgtttactattggtcaatattacctggcaggaatatagtcatacactcaacttgcttcttctttctctccatcttagttattttgaatagaatgcactctgcttcctttgcaagatctggcacgtcaaaataacaacttttttttatatacttacgtttttatcccggacgacttcacttttacacgcagagcgtcgcgaaattacaaccgagatttgactggacctcataattatcccgaagacagcaattagtaagtaagtatttacccaggtatccaatttgctctggaaaaacattggcacattcaagatagctgagaatagtaaaatccttaaatgcatcaagatagatattaaaaacaaaggaaacacgttcaaaccccctccccgtcaggcacgaaatcgagttagatcattcttccttcaattgtctggattgagctctcgtacaatgatctgggccctttcgaggatgtccttcgtcttctcgaatcgggattcgagcgcatttgctacggcgggcgccttttctgcctctgaaagttggccttcatccgcaatgacagcgttgaaatccctcgccatactctctacctcctcagtcaattttgtctgcagatcatcgaaacaagcgtcaagagctcctatgtattctctgcctgcgagtctagagatattggcaaagagcatcgaatgcgtcaagtggtcattcatgattttcttccggcgcttgtcgcttccaggccctatgtagatcaataaactggttgagcttggaaataaaaattactgagttgacaaacctccttcttgattgatcttggcatatgcaggctgcatcagacctgtaatatacgagctggcatggccataaatagtgtctcgctttatttttctagaattgtagttagaattttggctgggtatagccatattgggacatacataccctgcacattgtatgaccttgagcaaagtattcgaaatatgatgtccgatgcactgttgtctgaacttcatgctttgttgaaggttggcaagggcgcatggtgcaagctgaatatgggctgcagaatttagttacatgagcatgctggtgcaacacggagatctggggaaatacagtctttatcccacataggaatgacatacctccaaattgctggcaccatttatcgaaaatagtgtcagtatatctcgcaaggcttccttcctggaggtgcagcgaagtctgaatattctcccatttgagagttagctgctcccgtgaaggctggagtaagtcgtcattccaacatcgaccattaggtacagctccggtcgtatggtctccgtaatgactacaaaaggctgaataagtgctatgggaccactgggaataaattaggataagttgtgtagtgagaaaatcttggacaaaaactcactcctgcccattctagactgatctgaatactttcagccgtccagcgactttgatattgccctgcgcatttcttagaaccgtaaattaagttactgtatgaatcaactcacgaattatgttggtgatgcattcgtcataaagaccaatcaagctgcggcgcgtaatttgagccagtccctggtcggaaatgagttcctatcgaccatcagaaattccacacatgctaagagcattctcagagacccaatatgcccttttggatcaaaaatacccgatgaaaactattctgtgcattttccagaacccgtcgaaggagggcagcgtttccacctgtgactggatctactccagacaatgcccattggcgcagagagaaaagcaaagctggcacttcgtgattcaaaaatgcggatgttgaccgcattagagctgcagcgggcactaattggcagtagcgacgcagctcccggattcctgcgagatcaacgtatgcctcctcatcactctttccgctaaagcggtattcggagtagagtatgttactgacacaaaacacttcgacatcttggtgcctctggatgagctcatgtgatattagagagtttcgccgattgatgaggaattgactcatgctgcccaatgagttagtatgcagatactgacgcgaatgtcagatgtcagatgtatgttacttacttgaacttcagcactttttcctggcccctactacacattcagcgagtgaggttgtttcatcttgaggcagtgaccttaccgaagctccattgctttgaccgccagttccgatcgtctcgcaggagaggctttccgtgccttggactcggttgattcaagctttttccggaggacctgcatttccttattcatctctttcactcgatgagcatatggagtatctccgcgagaagactcctcaggtgaaatatcctaaaaatacaggtcagtgagcacctcccgctccgacgggccgctgtcattacctctgactttgtgcagatgatcctccgcggctgatcatctctacatcttcgcataatgtcttgaaccgacgcgtttgtacaagcacgggaaatatccataacaacaaagacctcatcacagctatgagaaagatagcgctctgtggctcgaaccctggcaaaattcagatcgctgaaacctggtagaaattagtctgcgacccaattccattggaaatgacaaaatgagattcagtacataccaggtagatcagctagcaccaagccgtttctcaaaataggtgatctgagatataccctgcaggagtattagtaaaacaacctggttctcgggaagtcccacgaaccttatcaacttgatgaatggccaaattgcaggattcccattaccagcattactggccgttagcatatcaagaatgtccctgcactcctcaatatcaccggcaactacagaatactcaagtgcatccagtccgccaggtcgcagtgctaagctggcagaggcccatcgttccaactgtgaaagaagaactaaataggcatcttcggagtcttgagaaagatgctccatagttaatcctggttgcttgttgaacaaggactgaaaagttccccaggctctcccggcctgatctcgacatttttgctgctcttcttgtgacttcagttcttggaagaatcgagtgacatggaattgacggaagatcgtaagaagctctcctaatagccctttcatttcttctgaagtcatgaaatctgcttcgatcgtaaaaggtccggtgtggttttcatcaacatgtcggaattcagtcacaacacaggtgcaagctgtgccttcgcggctctatacatgcattttagtaaaacctcgttaattagcgaagatgccaatgattaagacagaacatactgagcgtgacaagctctcttgatcaagtaaagagtttatcagtgagcttttcccttttcgagtgttaggactagaagtgacagaagacaaaagataacgacgaaaacccataccaacaccagagtcgccgatgaaacccacggtccgagtttccggatattcaaacatgctcattttcttagtccgcttgtacaggacatgtagatcggaagaatgatcttggtttagctcggagagtcccatgatatcagcgagcgcagccaattcacacttaacttctttcagaccatcctggacccgacgagaataaattggggcagtaggaagtggctcttcgcgaacaccagcagacttggcctcggtcatttcttcaacgtcactacagtgatcactgtctgattcttcatcatcttgtacccgatcgctttcggtgggtggagcggccttgccagtgctcgaggtagggaaagccccagggatccgtggggttgctcgggttgaacttgaagatatcgaggaagtcttctcgtgctgttgactgccattaattgtaggtacaagctcaggccttggactcggacttggagaagcattatgctgctgtgcataattggaatgcgagctacccggccttagccaagcatttgatgaccaagttggaggggaatgcatgggggctagggaatcgttgagacccaagttcccaaagataggaaccaatctcggagtttgtggagttaatgcaggaccccccgagcgattggtgtctcgagatgatgaaggggtgaaagctacttcagattgcgaatgaactgagaaggtgaactctgaagatggcacttccgtcatggtgtgtctgcgttttgacagttatcgaaaagcctgggtcaggggcggatggggtatatataaggagatcaatatggcctggtatggtaatcaatcccgaacctataacaaatccgctgtgggcctttgtatcgcgccttcatgctcctacttgcgctatattagcgctgcgtttcaaccacctttttagcgcctgcaagccactatggctgctcgtctagaattttgatgattctattctgactccagagaactatggctttgtccacagcttcgtgcatggtacgtgttatccacaaccttttgcgtgatacgttttatcttgaatgttgaatgagcagagaactgttgcaacttctagccccgaacgtccttttggcccccattagttagcgggcttagctgcattccaacccctgtaccaaaaaacgcacggagtcatgcgcaggaggcgagcatccaattagatttggagtccagaaaatttcgtccttttgttatcaagggcgttgcaaccctttcgaaaagcggcaaccacggagcactagcacactcacccatttctcacccgggcgacgcccaccggactatgaccgcatataagccacacgccggtgagttagtagctgagtgggtgaccaccagcgaaccagcgaatcctcaatattgtatattttttgacttctatttttattgttcggatcttaggaaaagatctcgtgccgccgactcttcacccccttcagcctattcacctgaatgctctgaacaccactattcaagacctggatatcctacacgctgggatgttgatgtttacaatgttcgccaaagtggccagctatacaaacaggctgtctgtattacactaatagctcagggggagctaaagatgatgtattaatactaactccggcagtgccttggggccgctgccatagagctgcatgataaggatgactcaaggtcatcaagtagtacggagatactataagaaaaaaaaaaaaacagtatgtgaagtctcaaagtgggagatttcttcagttctttgatctggatttatcttacggtcttagtacccctctcctaaaattttgagaaactctactagagcttaacaggcactaatcattatatggagacacagtgagttggtgacataccaccaaattcgattttaccgttgccattgttgtcgaatgcctggatatgctccgcagcctcctcgtcattcatttcaatgccttgctgcctagaagtgtcgataagctcgtctgtggtaatgaagacttaaacttgagcaccttggcaaaaggctatcagtgagagacgcacggtcattattgacatactagagtgcagaaagtaagcatcggcgcgcataatatctattgggaaggcctgtaagcagaataggcaaagaagaggatgctttctgttctattccgctggaactcccccccttaggcatgtaattgatagatataatcgcaaattcttcgagctccgacaaatatatattgatcagatctcacatacaatcaaatatttacattcatacaatatcatttggggggatgcgaaggcagctaatctactcgttgatgccaatgaagatatatacctgattgattttgggaggttatactgaaggttgggttgagaaggagaagtctaagtcgaccaagggagatctctagggacctgaaaatatcaggcggtacctttttagatgaatattacataactactatcgttccgtgctcatactatctactgttagttattacactttcttatccaggctaaggcagcctgctaagacgacttcctttactttatttatacattgatctgtgattagtttgcaatgcttgatgctctataaattcactatgtttgtatcttgattctgtatacgttgcctacttaatgccagaggcataatcctggtcagcctgaggtaatccgatcatatcgccctacgaaggtgtaaccgctatttttcatcgatcttaggcgttaaggccctccaaacatacgagtctccagcatttgaagccactcacactcgccacagtcctgtactttcccggagaaaagctgaccaaggcccaaaacgtttgaaaagccaagcctggatttcaacataaagcccccattcctaccgactgtatgaacttcaaacaaactctccgtatcctctggctccagcgtggggagatgggaatagtgacagcctcatctcttcaatgcgtacttgcgaaagatagcattgagcggtgtcgaaggcggtctaaaactagtaagagctagtcctaattaggctgtaaagccattaaaatcaggcaccggactgttgtcggagaacgcagggtcggcataccagagaataccggaggatctattaatcctaaaaatgtatcattttcccggacgtttgttatttttagagagttagagaatttattgacatttttctgccacatatacaattgccttaccactcgaatttccatcagatgcttatacttaaaattccagtaccgcctgtctagatcgggtactactcagaattctaccacatttctactatactttattctatataaaaagacatatattttaattagaaaaaaatcatatctaacttgattcctagaacagtagagtaaagtaggtactcaaccaagttttagaggtagtgctggaatttcaaggataagcatccgataaaggcaacaatttcctgaatttaaattcatatttatagattagatgatctctgaatagctttatacttcggtatacagtacaatgattgataattctatattatacttcgtatggttgtcaaattaaattaaaagggaaaactaaggcggtggtaaaagcggtaacccgattaggctggttgtcgtgatggtcccaaaaagccctcgtacccttccttttcctcaacattgaacttcattttccccacttgtcactgcacgcagcaccagcgccactggcaccactgctcgtactgtttcctaatggcggctaccgaaaagtctggtatcagccttatgagccaatacaatattgttctaccgaaaaggcaggcgtatgactcttccggcaaacctatacctacatgcgatccagatcaatgtgctgcggcaataaagggggaggatctccccgtcgatctaagctcgttttggcatcaaagagcagttatccgtgggattcgtgattcacttcaatttgcaacaagcccggcaattcttgagctatgctccggtgacgatggtcaggcccatcaattttctcgtgcccgtaatgctcgcctgataatgagtgatgtaatccccgatatgcaaaatcctgccactcagccgtactgtatctggtatcccgaccttgcatcagaagaaacatatcgcgaagttgcccgtcggtatccgtctatgcggtatcaagtgggccgagcgtgtgctgcagcatgctatatagatctctacaaagaattggactttttgcctgacgtttctattgcggaagaatcccgcgaagttgataaagacgccgaaatctataagattattatatccgccccccaacgatatgctgttatggaagatttctctcgatccgttcatcttgaaaccccacgaacgtctgcgtctctgaatggcgatatgaagccccgatgggctttaggacagcgagttctccctggtaaaaatttaccagagacgactgctgatgatattgacatcgaggaagatggatttatcggctttcaagctatcagcttgaaggatatcagcggaatggaggacttcgctgaactgggcccaggccagtccgatcaactgtggatgcctcttccgcctgatctcccaaatcttgaaaagcgccttcagacacagatggccgcgtgggagggcaatgtggatcgatacagtcgactaatgcacccacgtaggctgagaaccaaacttgaatataattgtattcttcgtggcatttatcacagtacaaccttcgccagatggtgggcctatcagctagaaacaaaccctggacgggctatcctcccaggtaaattgctcagccaaggcaatgaacgggagtgcagagagatacgcaccgcgattaatgcccgcgtgataatgaacaatgatatctctggtatcgacgatgactcggactgtctcccgtgggtcatatgggggcccgtaaagccctctgagaacactttagctgatctggttcgaaagtgtccgtccatgggacatcaagttgcgatcacttgtataatgtgtgattacggttcgatattccgaagtttgaagcccccctataccagatccttgtatgtggctgctaggcgaagtgaaaatccattctacctacaataccttgaggaaatcataaaggagcgcgacataactcccccggactttcattacttcaaggactttgatcacactgcaccaggcttacagactgatctggagcctagagatgatctcactagtcccactatcagctaccatgatatggagatcgggtatgggcaatatccctgtggaaatgaacacgaagaaacccgaggtacatatggaggcgggctagcaaatccgggaacggtggagagatacatgtggctctcaactgaaactgcacagaagttgaaagatgaacttgacgtgccctacccaggtgcggatattggtcatttgtatgacgatgaagaacttcgatccaagctttcacgccgtatacagcctatggatcggtagtatgcaggttttgatatgtcgaatacagtcagtccctttgattttcgagtattatctgccgagtattcgctagcttagttaccgatggcaatatcgctcgtagatactaggaccaacctttataatctcagatcagttccaatccctcttccacgtataatatagcgcgtcgagcacttgtggtataatagcagttctgtaaatacactctagcagcactggcacattgtgacaattcttatgcaggtaaataaaagctctctaagaaacttgcaggtttctcgaacttgaatgaattaccagtactgcgccgagcctgacgaagcaacgggggtgtgaatactcatgaaacaccactgtacgtgttccagggtcaaccgataacccaatcatatcacggtcctcgttacctgagcgggtcagtgcggccgtcgcgcgacctagggtaaatctcaccctgatctcacgcagcttctcaccctgtttatagtgcactcactctgtttatagtgcactcaccctgctcacccccggtcgagcgaccgtaaagcggcgctcacccatttatcacctgggcgacacccacccgaatatcgactgcgaataagccacacgccggtgagttagtagttgggtgggtgaccaccagcgaatcctcactgttgtatgtttatgtttttgtgttgttcattggcctgaacgtcgagttgcctagtatatgtgagattgagcagccgagaaatggttttctgtctactattccacggttagattttgatgttgagaggtccacattagcgggatagttccgcacgacgttatcaatcaaagggctggacacctacctgatggacactactacacctgaacaactcaacactccgaagttacctacatcgaaatttgcacccaattgctcaattgtattgaagtcccatcggccatgacagcccaaaccccaatccacgagcccgcaactgctgacggctggcatggcgtcatcccgagcgaggaattccccgccgagaaaggccgctaccacctctatatcggcctcttttgtcccttcgcccatcgtgtaaatttcgtccgccatctgaaaggcttgaccgaattcattgacatcagcattgtcaagccataccccaagggtgacgccaaaggctggccaggatggcgattcccggcctctgatgatgagtatcccggtgcgacagttgatcacctctttggtgaagactatttgcacaaagtctatttccgagccgaccccgattacaaggggcggtattcggtgccgttgctgtgggatacgaagactggaacggcggtttgcaatgtataacacctaatggatcttggcgagtaaacgttttactgaccggatatatcgtggttaggaaagtgcggaacttcttcgatggcttcccacggctttcaatgaactgcttccagcatcgctcgctgcaattgacctttacccggtacatctgcgcgataaaattgatgcagtcaccacgtggatgcaatctgatgtcaatgctggagtatataaagcaggctttgcgtcctcgcaggaagagtatgacagaaacgtcattcctgtgtttggggctctgaacaaactcgagaagattgttgcaaataatggaggcccgtttgtgctcggtcgagatttaactgagctggatatccggttgtatgcaacattgatccgttttgacacggtatatgtgcaacatttcaagtgcaacctaggcaccatccgacatgattatccagttttaaacaactggctcaagggcatgtattggaatgttaaagcggccagagactcgacaaactttctacatatcaaggagaatgtatgttgacatgcttttttggtactaattgacaccaactgacttgatacagtatacaaagagtcatgcggatatcaatccaaaggcaatcacgcctatgggtcctttccctaacgtcgaggaggggttcgaagaggactggagcaagttggctgtcggcgaggtcaagcacccctctgtgttagactatgaaactacaattcctgatctgtagtgattaatattggctgtcaagatgtttgatattaagttatctacgtcatgtctggttgtgcctcttgaatgcttttttctagatgtcagtgtttgagatagaacctaggagcacaaaatacatctaatgatactggagaattgggtcatggatggcatactttcgcctcatagacagaggatatcgagtgctaaatgaatgtatatgcatcctagcaagcccagctgggcagcgaaattatcctaaaaatcaatgtcctttgcaactgctcaatccatcgttctgcacacgttccctagtcctccctgtttttttcttcttcggctgtcgggtagcctcctcctaaccatcttcggaagaattcacctcttcaatgatccccgattcaacagcctgtgtccaggtgtggacattcttgtttcccttactagtgaaaattgaaaatgcaccattcggtccttcacggatatccccagagggaccgagtatctgcttaagcgactccgtgctaaacatccgatggatgttccgggtcttttccttctgcagaccgatcatccacgagtcaatggacccttttgccacaatttggacgtattccactaagcgaggttgtccgatgcggtacagacgacagtacgcctagcaacttattgttagcttgcctatagccttgaacccttctaggatctgaattcagacttccttacctggtcttgaatcgcttcattccaccagggatccacaaggatgcacttgttagccatagtcaaattgaggccaacaccgccagtcttcagggaggaaatcatgattttgatatctttctccttgctgaattgctcaatttgcctatcacgcgaggttggcgacaccttccctgtaatctatatgggcattgttagttatgtggctcggtgtttttctcttaccagtcttgacgtacggttgcatatttccagccctcctcctcgcacatgaactgaagaagttgaatggtcttcaggaattgagcgaagatgacgatcttggcatttccatcctcttgcacccagtctgtgatgagtttccgaaccgctgtggttttcgctgacggcatacgatccccaatgcacgaaatccaatcgctctcatcctcactgggctcgtcccactcgcgatctgatggatttttcaatagaacctgttgtttgaaagacttttgacgccgctttttgaagatgttcctgccatttcccttccgcacggactgctttctcttctttggtgagccctttggtgaatcgtcggagtatccggcctccttgatgggttttttgcaggagctgcagatgcgggtggcggtatcggtatttccactttggtcgggtagtgcatcaaagcaccccttgcaataaaggtgatgacaggatgtgaccacgaatgcctccttctcgttcacgctattcgtgcaatgagggcatattctgcatatgacttggtagtgttttccctcgttttcgcgcacgcgctccacgtgttcgtaaaattttacctggaggtcggaaaagtctcctggaggccttggtcgaggagcgaccttgtcacccataccgagaattaagttgatgatgacccctgatgcgctcttaaccacgccttctgcttgtaccatctttttgagttttgcaatgacattttggttgagcacagtctcgaggaatttttgggcgaggagcggatggctcacaaacattctcagcattgttataacggccaagatgcatttgctctgtttctgtctggtatcggcagacccttgtgagatgtgttagcgctcagcttcttttgctatcaatgtcagacctaccattgaccattgcaatgccaagatcctgaatctccctgtaaagaaacttttcagctgggcaaagttcgacctctacgacacggttattgatgcccggaagcgtgataatgggcttgccaagtatccaggtactgtatgtgctgcggtgtaggacagtttcaaggatgttatccaacccctatagagaatgttaatcttggattttgaagtaaaggcttcctcaaggagactaaccttggagtattttttcaggaaggtgtcatatcccattctttccgatgtaaagataaaatggagatatgggtaaagttcttccaccccgctagaaacatttagtcagtactcaggacttcggtcattccaaagcttgccatgcccaagtggtgactagttcttacttgtgtaacggcgtcccgctcatagcccatttgaatttgcctttcaaggctcggacagcgatggaggttgcggaatctttgttcttgatcaaatgagcttctgcgaagtcgaattagtatcaaccgcattgaatatatttataagtcctgtacataccgtcaagaatgatgcggtgccactcaaccttatggaaaggtccagctctacgatagtattccttttctctccaagcctcaagcttttctggagacttgatcatgactggtggtttcaacttcgggtgagaactgcagacttgctcatatgtggtgatcctataaggtcagggacatgaaacatacagtaatctgcttcaaatttcttacacaataagccgtttttgcatcgctctcacaacatcgctctcgctcgttcgggcaccggcgtaatactcgagaacatctctacttaccctttcctcgcaatgcgtagagatttgatcgatcctacaaccgagttaagtaacactcacattaatcttttaagtcgaagagtgagacataccactgtgcaatcaagcttctcgggacaatgatcagagttggggcttttgaacgatttgagaacttttcgttcgcgatatttgcttatggaaaatataagattttgacttctcaaggtggtcttcgttcttaccgagagctgtaagcgttttccccaggcccatctcgtcgcagagcaagcctccatttggctccaccgccgaactctcgcgattgcgctatgcacgtcagctaggtaccatgcttataacgtagaatgccaaacttaccatccacgcagcggccttgagctgtttcaatagttagtcacatatatcacaatttgaacctagtagatcaagatttcaaacctgatggtgcttcagcagtgttttgagacctctaaccttccagttcatgttgatgattgacgccgagggctcgaatttcctcgagtcctgaatcaatgaatttgcgtcttttttagcttgcggttggtcttcaattgaaagcttcgcaacttcctctgcgagcgctgtcgtcttgttcttttgctgggacacaggggtcaattgctgtatattagcgttggcctttgcgccgctgagtatgttactatgcatcagacccttgactttctcgatgaaactcgatgaggttgagattagttcctgctcttttcccttgggtttgcttgagatctcttttttcactggcctggaagaacattcaagatcactatcatttctggaagattcagcgggctcgggctcggaatccaccagtgactcctcgtctgaggctaatttgaactcctcatcagaacagttttcctcgtcaccagaagactcctcatcattggagacttggttcgagcctgttttatccagcgattcctcatcaggttccttagggaaattctctggcacaggatcatcttgtttcaaggcttttttcgggcagaagtaagtggtgattagtttctgatttggcggttcaccttggatatgggcttccacgtttgtcaacttgctcggcctatttgtatgatcctctagctcggacttcacctccatgccattgacaggacttggagtgtcctttaggacctcctccattgtgttcgtagtatttttagtatttttagtgggtttctctattttgacagcactttgcatgttgaaattgatggatggaccatgggtggtgctgaggaggtggagtgaacaaagttggatagagaagtttagggtgtgcgaatcagaaataggagacgaggagaaataattcggtgagctagctcagagaagaagcaagaatttgaatgtaacaacacagagcatagaaatgaccccgaagttaaacggaggcgatgagacgagttgcttcgcgggttgaaacatagaatgcgtggagataacagaattggataatcaaggaatagatatgtgaagggttgattgtaacgaatagggtgaaggatttagaggtacggactggccatataatagagagatattgatggccgagatggaatagatgtgaatagaacgaggataaagccaagttgagggtgcctaagtgcaagaaggagaatgagagatacctcaaaggcaaaaaatacataattgccatgcagaaaaacttttgattgtcaccttacatccctaaggtcagtgagaaatagagagggtgtataaatgtgttggagggagtgagaatcaacaagcaaaaatatctatacctcccgctaatcccgggaattgcctattcagtaagcgtgaatagcctcaggtttgcaactcgttattgctattgaacctgtctaggtgacaggcactttcgcctacataagatcaggctttcacgttaagatcggagggtatagcatatttatttaacaaataaatcaatttttgcttcctatttactgtcatagggtcaccaccaccagctacttcaaagaatgacgtatcttgtgcctttgatattgttgatcaacatgtcttttataatctctctcattcacctcgttgactggaattctatcaatatctccgttatcttaaagatattgaaaaatatgtctcaaaatatatatcgttcatccttatccgatgttacccatagcagaatacaactttagtatatattctgccggtataatggtaactctctaaagaatcgtctgtaagggacttgtacctatgacatagtgtcatatcaataagacaggaattaaactctgagtagatgtataggccagaaaaccttgttaaatttcgccaatcttacagactattcttagagccgtgtaggtatacgagaatatttacgcaaaatgcactttgtagttggaaaataacagcaaagattcatcgactatcaataaactgatcatacatgccgtgaatcgtgaaagcatatccgaaaaaaggacataaacctgaagattgcagattgtgccaaatgaagtgtagatttgcacaacatagagtcgagatgatgagaccacaacagtgtcagaacgcgaaaaatcttcgaaggcctttgtatccaggctactggtcctggtcctactcaagctcttgctctggctctgagtggccttcctcctcgcttttttcaggagtagtagtgcggctatcctcgtttggctcgggagtaatagagcgacgatactcgggttgctggaaatcaaggatgcgacgaacatccctggggaaatatgtaggtgcctgaacacgggtatcctcacgcagctggtaaaggttggagcgggccatagctcgtcctagttggtagcttcctctagtctgcacagcctctcgaacctgggcgttggtcagactctcctcatgcagttcactatcatcttcctcggggacctgtgcctcatcaacccagagggtccgcagcacctctcgaccatggcgcatggggcgctccgtaaacggggtgttgcggggagggacgaaatcagacatttcgcggttgagtgggagaccaaaggcatcgcgggggccggtggaagcttcattccaagcgaggttggacggagtgtcttgctcttcttcgtcagaggtttcgaggtcagactgagttagaaagatgttctctttatcctcttccatggagtagaacccttgctgcggagggctgggggtctgctggtcctgcggatcttcgtaaatggtaaagttgaggctcgagggacggtgagattcccagacgcgcgagttggggttagtcttgggtggagaaccgggtagctcccggggctgtaggggagccatcgaaccggaattaagttgatatttggggggtggaaaccactcagattcttcagtctcctcggttcctggattcagaaaaatgagttgcccgtctcatgatttgagaataaacaaaataacttaccaagccgagtcagacgagactcatggaccgcaggtgttgagtacagcgggtttccgtagacagaagctaagtaccaaggggaaggcgcgatgctttcctcagctggatggcgctcgcgcttcgccccggtagagatagacacagcaaaagggttttggtcaaagtggtcttccaccgagggtagcacgtagggaattgcagggttcgtctggatttcagcgagctaggtggtgaacgcggagagcgtcgagtgttagcttgctgggacacagagggataacgcgcgcaaacggggaaagcgccgggatatacttaccccatcatcgcccactttaatggtcacctccacgtccgcgggatccatcttgaaagactactccgccgttcaattagtataccatgcccttcgcgagcgatgtgatgagtctatccattggcaatgtctccaggcaaccaatctgtctgacttgtaaagcttttggggagagagcatacctttaggaaaggaaagaaatgtagcaatattcttgctccgaaggatcaagtattggtcctcgctggttggctcaagcgccttgcctgtttcaaaaagaatgtcagcatggaattaaacgaggctcaaaggcttgtcaacacaggggatatacttggctgcttgggttaaaacaagagcaacttgaggctgtaactgtagctgtcctcgatactcggtggcccaaccaaccctgcacagtgtggtgtacaaggtctcgtcggcactatgtcgggtgacaacaaggaagacaagggatcaaagacagaattggactgtatatctcagggaaggtcgctagctacgcttactcttcgtgtgcttagtcgtcgtacgcgtcgctcttggtcgctccaactctcaccatcttagcatttagggttttttatactatatggactctaacttcgcaggccacttcaagtttagaagtacttcattgatttctaatcatgaacgataattatattgtctgaagttcatgtgtggcctaaaatgatacatgctcatgttatacttcgtctatagatagttaggggcaaggcttatcacgtgggcatatatgacatcatagcatgcacgttgtgtaatcagacatataatattataatgagatcaataaagcaagaacaagtgaaattctcattgctgtagattgaaatatgctaattcacggtactggtgtaccaggcgcaagatcaatggtacgtgtatatatagtgaacattcacacaagtctaagcagatcacaagggagacccgcaaacacatcagatacaaacataatcaacaaagatactgaatcccaaggacactgtaggatatgtagtatatgcaatcagaaatggaacacactggaacgactttggcataaacgaattaacagtgtagagaaaaacgatacgtaaaataatcacaggatagaaatttctagggtgacttgagattgggtcgagacgtattacctatattttagcatgaacattttacaaggagcccggtttcaaaaaaagggatggatagattgaggttggtcagctacctatggaataaagcatggatctatcggcaactagcgaagaacagagacccaataaagtcatagtttaagaccgtccatccatcaccctattattgtcaacccccggttcggtcttcaggactcgactcatcagacccacagaatacacagcacggacgcattgccccttgagagatttcaagaacaccgggaaaaatatgaaggggcgaggaaaaaaaaggacccggtaatagatgcagcaaaccacatcagagaagccaaagccaacgcagcaaaggctcaaacgcggaggagtggggggcagttattggacacgggcatcattttgccgaaaggccatgagcaaatacattggggcggaaaaaataaaggaaatgggtatttcgttctctcgaggggaagtgcgacgttgccgtgggatctgtgtggatggaaaatgaaaagagaaaatcacgagcccctgtacatcggcttcaccaagctagcgtagatactcatgaaatggtcatgggcagtggtaaatggtgcgtaaatgtaatcgaggggatagaaatctttttccaatattctccgtttatctgaactggccggggccgaccatgccaccacggacgtcaccgccgtttgactggccaaacatctctagcaggtgtctagatgaaggaggagggccctgtgggccagggttaccaccgaagggaccaagtcccatcatggcctcggggtttggcgacatgggagggaagcctggaggagggccgttcatataacctggaggtggcatcatgcctggaggtaggccgcgcgggaagccttggcgctcattcattgggggcgcgttgccgggcataggaagcatgccaggggggaagttgggattcatgccgcggcctggagtggatattccaggaggagggcccataggactcgatacaccctgctgcgggacaggctggccagtccatccaaggggtggcagatgctcgagacccgggggtcgctgaagtggcatggggggctgattcgcgccttgaagaggtcgcgagccacctggggtcatggggccttgattgccctgagggaatgacatatcgtcaaagaatcccataggcggaccattcgcaggtcgccggcggaggtgctcgctatctggtcgctgcatgtttgcaattgctgggtcgtcgaggaaattcggtgtcttttgggcagaaagccctggcggggggcgtggcatgccttctggcatgagacctggaggaggggcaatacccgagttgggagactgctgggatagatgacccgcagatggtggaccgactcggacttgctgcatcagacgaagcaagtgggccctctccagcgcctggggatccttggagctaacttgggccatggggttctcggggccagcgcccatgtagtcggatcggtgagagggttccctaggagatgacagagatagggcggcatgttgctgttcgccctgcatcatggagatattccgttgctgctgaggtaaacccatctcgtgaggcgtagagttctccgagcgttgtccaccaagcatctgcagaatgcgctgaaagccttcttggtccgcactgtgggatgggaaaggcatactctcagacgcctgctggggctgttgataatgctgggcctggggaggggcactgaaataaggcatcggctcgggttctctggcagggctctctggcatggggctaaagagacctgcaaaacgagatgattttccaggctttccggcaaagagggagggttcctttttagcaactggatcggcagcgataggagtactggcttctggggtctgaggctgaaccttcgaatcgctcaggagtccgaagaatcgttccatcgattcgtcggacataaactgagcaccggaattactgaagatctcaccatcagtgcggcgggtctccggcttttgttcttcaacatgtgcttctctcttctcctcagcaggtgccggggtttgtgcggatgatccagatccagatccagccttcatacgctccttccaccgctcaaagtcctcctgggtgtgcgctcgtcgtggttcgtctcgttcattggcatccagccattcaggttcttgttcaaatttggcgccgcggttccactcacgctcggtgccgtgtcgggtctggttttggcgccattctcggttgcgcaacggcggtttatcgtcatccgcatcagcggcttcttgggcctgttcttcgcggaaccagcttccttcatatttggatcgtgggggctgtccttctttccgaatggggaatcggccatctttgtcacggggaacccgttcagcatttggatcgcggggcccttctttgttttcccatctgtcgaattcgccgtttcgtcgaggcttgcgctcttgctcatctgggccgaatgtgcgacgtgggcgcccggcattccagtcttctctctcaccacgccgggcagtcagtggccccggcttggcctcccgtcgatctaactctttctctggggcatcgcggtccttgaacaacctgtctctgaagttgaatcggtcgttcttcgtttcatccgaatcatttggccgtgccgctggtcggtccgtcagatcgaacgagcctttgccgccaatgcgagatgaggcgaaggcggttttggggggaccgagtacaatatcctctgaaaatagaagaaatccaattagcaaatgcctcagataggtcgggatacttgatgttcgacagaaagggagacaataataccagaattagatccccgagagatatgtttggcttcaaaaaagctaggtcttctgtttgtgccagtctctgccggactgttgacatcacgggcgccatgggttttgcgttgtgtggttgtttggtcaggttgaggcctacaggttgcggtcagtcttgaaggtgacagtgcgggacagctgaagaattgcaagcattggagctaccatacatccactcttccattggaggcagaccagcaggctttgcgacaaggggcgagccgcggagccatatcagctcatcgatctcgtaccgtcgcgccatggcggctcggtctgtggggttgtgtgtgcgtggtcttcttcacggtgatgatcggttcattggttgaatgagtaacaaacccagattgagtaaccaaggatgagacgcgaaggtatgaaatatttctagcaaaatacgttgaataggaagcaggcagcgttgggtggttatggaaaagaggttggatgaggagaagcacacaagccaccttgtggcgatggcggtgaccagagtctcgggagccaactctccacttgccagttggtcctttgatcttagaaatttatatatctttcactcttactccttactacgtatagtcttgatattgcaaacacgatagtgttatacagtagttagtgaaagcccagatagtcaccttattttcatgttcaaaatacatgtggcatagatctataagacaagcgaccctcataagcgtacatgtactctgtcgcctgaatacccttcactataatttctgtaactagtaaaagcattattcgggagtgttaaaaaaaaacaatattagctatagaacaaaatacgggtgtatatgtgaaaagcagcgactgtttcatgtataccaaagcgacaggctttatttagggttaggcgtgtgtcgctattcaaagtaaaagtttaaagtttaagtgtgagagctagatgatatttcatttatattgcattgatgatattatagatcgtggaagcttatattgataccagtatatatgtcagaattgggagttgaggtagcatgaaagccatatgaaaagacatctgaaaaagaatcagtacgatataggtctatatgtataggagactcgtattacaaaatactgcagaaaatccttggattgtactaaaagacatggaagattgcttgttgaaaacaaccagccgaacacaatagatctcagagctgttctaacatatcgaaagaaggaagatcatcttctgttggagaagataattccaagataacataatgattattccagccacaagctagatagaccatcgtaagagcacagcagcgattatgacgggcaatacgctaattagctcccccagacctgcaaactcgggcggaattctgacattcacaaaagccccagccgcaagtagcacggcaaatgtgttgtagacaaaactccaaacgaaattgaacttgatacgtctcatagagaccttgctggcatccatcatggtgagaaggccagacagatatggacgcataagcacgacatcggctgcagactgggcaacatcactgccttcgtttatgtgaacgccgactgttgcttgcgcgagcgccacggcgtcattggtgccatccccgcaaaagatgacaatcggctccttaccacctgaaagactgcctaggagatctttgatgtagacctgcttgtccgctggagagctacgagcacgaatgttgctctcggggatagctaaatttgtcgccacgttttgcacggcgccttcgtcgtcgcccgataccacatgaaccgtcacgccgcgtctctgtagggtattgaccacatggggtgcatcagctcggagagagtcctcaagaccaaatacagcgagtagcacaccattgatggtgaagcagaacacagtatagccttttgtaagcaccggttgcaccagggggtgcgtggaagtcttcagccagcgagaattcccagcttgtagcgtttgactaccaagtttagcttccacacctcggcctgtcaagcttttgacgtcagggacagctgttgcaacaatccccttgtgcctaatatgattaccaacagcaaccgataccgggtgcttgctgtcaccgatgaggcccaaaagaagtgacaggcatgattcctcgtctccgagataactctcaacgactacgctgagctttccctgagtcagcgttcctgtcttgtcaaggaccacatgagaggctctataggcgacttcgatagaatgcgccgacttgaatataacccctcgctctgctgcgataccgctgcagatgacaaccaccatcggtacggcaagaccaatggcacaaggacatgaaactataagcaccgtgatggcgtaggtgacagcctgcacggttgcttcggatctagtcttagcttgtattgatatgccaagagccacccaaataacaaatgtggcaatagtcaagcctacaataactggaacaaaatatgaagccaccttgtcggcaagttcttgaatctttggtttggaaagcttggcttcatcgaccatggcggcgatagtgttaatagcgttgtcgcctgggaggcgagttagcctgacaattagacttgccgatccgttgattgtccctgcaatgacacgcgacttgggtttcttttcgacatgccgcgactctccggtgagcattgactcgttcacttcagatgacccagatacaacagtcccgtcggtcgggattctcatatcgggaaggaccttgaacctgtctccgtattgcagtagcctgacgtcgatttcacgagcatctattgaaggtgattcgtccacaagaagggcagtttgggcctgaagcgatcgaatagatattgactcgaccgctttttgtcgggcaagtgtagcgacatatcgtccgaacatgatcaatgtaactagaagtgtgcttgtttcaaagaattggccagtggaaagaggtctactagcaacgagaaagccgaaagaaaccacagagaagatatatgccacgctggtgcttaacacaataagaaggtccatctcgatgactcgcgaaaagacaagagccttcaaggctttgggataaaaaggtcctgctatgacaacctgaatgatagtagccaaagccagcgaggcggagctataggcgatttttctctcggagatgggggcccatgccatgattaagactgggatggtaagaactgcagataagagagtcatgaacccggaatggcggacatgcttgctaccagctgcaagtgttggatcaccagagatgggcgcaaggcttgctatatcaccccagtgcttttcaatgagatctcgtgctccaaccacttctggatcaaaagatacacgaatagtgcaatttccgacgagcgaaatgtcactcacaccttgcggccaagcctggttgacgatcaaacctggatccccagaaacaattatatccatagctgacccattactggcgattatctcacatttgaactctgtggtccgctccaagtgctttataacaagctccacagtagagatactgaggtccaagtcgaattcagctcgagatagaaccaaacttgtcctcaagttcccaacccctgacattatcgcgagggttctgttgagtttcgtctcacagccagtgcaagtcataccagatatcgagaggaccacatgctcaacgcctatggcctgaccctcgagatcaggggcaattcttacagccccacccttctcgtcgttgggtaaggatggcttttcggaggtacagcaaatatcagcacaagagccatccgctggctttatctctgacttatctgattcggagatacaggggtcggtgaagttgttgccgcaggtggtaattttgggtttgcagcaagagttggtggagcaaccttggctggcacgagttttagttacacgtgcaggcttgtactttccgccatggtcggtacttcgaagcggcgattgacttgaagatttactacttgcgcagcaagattcaaccgagacgcacgagacagactgtttcagtggccgttcagagctccgacccttacccagcgaagagcgctttcgaggctcgcagcatgattccttgccaagggcaagaagagcacggcagatacaccccagtgctgtaagcctagcagcatactgctctctaactgagcgatggtgtcgattgcaagctctgccctgaagcgttgcaccttctgtcggtgtggatgtcgaggaaagagctgcattagacccaaaattagtagagtactatgacataagccatttatattcaacatacagtaaccagctgcttccatgcatggtatatctgaccccgtatgacactcacgtaaagccagacgatcaaggcaggcttcatcacagcatggcgaaggcttgtcttggcagcactctgccacaataggttcaacggaagtagcatgttcactcgaccatggggtaccggagccggtgtgtgtgtgagggtggcccgaagaaacactagagcttaaaattttagatttggcggtaaaatttcctgcgcaacaagctacgttagcggaaaaagcatcaagacgacggatattcttaccagcagccgaggcagactggtcgcagcagccttcctcgcaagccccaggcagagctgcacccttacaaggatcaatagggtccttgtatacggggtcatcacgctgggcagcggaagttgcattggcattattatcatctgttttgtcgttctttcggatagcgccgttcctataagacttctcttgacttgaagtctccgatgaactgccacaacaattcgatgaactattcgatttcttcaactcagctttatcaatcgcatccgcttgagagggcgtcctttcacagcaagagcgtcccataatgctggttggatagttcaacgtggagtcgtgggaggattgtggggatctgggaccgaggagtggggtcgtcttttggcttgtttggcttgtttggcttgtttggcttgtttgcagggaactactcttcgtagtacgtactagtactgcttaattaaccctagagagcctttcactaactacttacacgccagttaccgtatttgagtagtaaaccaattcattattctagcaaatcattccaagcaaagtcgagcagagcgttttgttgtgtactctatgctttctctatgtgaaaccgaggtgaaacaagaaaactagatgttggatggtaatgtgattcccggggccccgcaatttagatactccgtacagtgctgcagtaagtactaccatgctcgtgaatacttcaaatacagctattgcccgctgatacggatgtgtacgaatgcttggcagttcaaccttacaaggtcctccgtgcttccaaggttgcatttttatcagtggagcccaggtccggtgtttatgtacatatcccgaagtccgttttaggcaatgaatatccaaggcaggggtccacttaggacgccagcctacattctattggttcctgggaattgcattaaactcaaagcacgtggaaatgaagtttcggccgaaccggctatgtctcggaaccgacaaccggccccggtagtgcaggccctaagtcgttccctccttttaaaactcagcccattaccgttgcaacttgcaagttggccttggattccccgcaatacgccctgcagcattccacaacatccatacttaccctttgggacagagcgaaacacgaagctgccgagccgaccgagccgaactatatacttcgccttgaacaggcagcaccacagtttctggggattggatgctcgataattataccaaatgatctattgtgcctaccaggcctgtcgattattggaaaggcagcacatccactggaataggtgttgaggcagcctttcttcctctctgtccctctcagggaacagctcaattcattccatgtttttctttctcattcctattcactacaataggacggcattcttcaactccgcatggtttccattacgtggtgcacgtgtgcgtatggggtatactgtgtgcaaagaaacaagaagtaaatgacattcgaaaaactgactatgacagagaccacccacggccataaagacagggaaaaacaggacaaaaaagcagtcggaaggatacaggctgggcaacaacaaaccgaacacttgactcatggctggcagttgaccactgtggtgatcattcaatgatgccccgaactggaacccggcttcagacagtatattttctgcacatccgccaactcagcctcgaaatcgatctcaaggtttttcagcagaccgtcggccaaatcaaaaacccaaccatgaacgatgggatactggttctcttggtagctttgttggacagccgcggttttgatgatattcctacaggattcaatcacattgagttcaatcaatcgattgtatcggtcgtgctcgtcggatatttcgtcaagttcttgctcgtgcaagcgataaacatcgcggatgtttcgcagccatgggttaagcaatcccagatcagcaggtgtcaaggccgcctgaacacctccacagttgtagtggccgcacacgatgatatgcttgactttgaggtgccgcacggcatagttgatcaccgacatgacgttgaggtcaacattgggcactaggttggcgatgttacggtgaacgaacacctcgcccgcctccagacccatgatttcgttggcggggacacggctatcgctacagcctatgtacctgattgccgttagacgaaaaagacaaagttggagcctatgttgcttacagatagtctggtgattgtccagcagcaagcttgtcgaaaaaggtcgcatccgtctcttttttcgacgcgacccatatcttgttgttttggaagatatggtcgagcgactgttggagatagtgattgccgttcggttcggaggccatcttgtcagagtgtacaaaaacttggcaaatatgaacgtggtttgaggttttggtggtctcacgcagagcagggagcagatccgaatctgttgggacctgtcgaggggtttgtgcttatataagcacgtgtcaagacctcgggaccatccgcaaccttttccaaggacccggtcctttgccttcgggtattgagttatcacggtctaacggaaactcttagtgtcaattttacaccgactatttcgactacagcttcactatctcaagagtagccagccacttatgcggtctgtcatgtcttttgggtagtatttctggatgtcttgtttcggatatcccttatcggttttatagctagacggcagaaaaaggcggaagaaagtgtagaatccttcgtcaaggatgttataaaccaatgacgccatgactctgattctgccattcacattctacggtcagcatcataccgccgcccgcactgaaccgccgcgtttccaaggtcgcacacctcggcccgtgtcggagcggcacgcaagaagttgacactcgggtgagatagccaggggaaatagatcggcaccggcccgcgcggattcgagctcgtagctctcgagcaagccgaatttcgggtgccaggtgcacgataagccggccccacactgacgccgtccgatgagatctgcagaagctgatcgggtagcggctggaggacgagaagcggaagctcttgagcagcttacctgctcgcagccgatgtgctgaccaggcggctcatgtcgtcgctcgcgaggctggggatgcatgctcttgccgtcccagggtggccgtccatctgcgcctggagcagggacactttggttgggtcagcgaggtgcaggccggcaagacggtcccgtcgggagaccatgcaagcagtcctagatctagatggtggaatgagtagcgcttgcgcttcattttgtgcagttcacgatgttgacgacaccttctcttttcctccccgggatgggctgctactccgctcagacaatcactctcagtttgacttgcaactaggggtcgatcatggttcggaccacaaaattttcgtattctttaaatttcgatatttgatccctactttatctatgtccatctcctggactgagacccgagaaagctgtggagggaaagttttcgatgacctttggaaattggtgggtctagacgttcatcccagaagaataggatagtgatgcagaatatgctagattgtgaattatgctacagtacattaaaaatgcgacctacaactttcgcaaagctccgtcgttcagcatgaaaaataacagtatcaatcctatgaatttccgacaggtttgaacaactggtccttcgggtgtgggggataaatacggggcgttgtagctgccaccgatgccaggtaccaaaaatactatttggtggaaagcatggtgttactttcaatggcgtggctatcgatgatcggtgaatactggatcatccacacgtcgttcactacttggcggagtatgcctgtttcctcgtaggtcgagtgaaaggcaaatggaagcccttgatcaatcatgtactcgaccacttggccgattgtatgacgcatcacattcacgttgctgaaccgacctctcagtttgtgtaccttaacccacggaactttgagctcccccacgactctgagtgaaagtgaaagtggaggattatccgataccaaggcaacatcaggtaccttggtatatccagttccaaccgacttaaagtcagcaaaccggatattcacgtgttgtgccctgaagacagctccaagaatctgccccacagattgttcgaactgtccctgaacgcctgtttcatcggcaacatagacttcttcttctctcaggtcccgaccgtcaattttgtagtcgattatggcttgggatcagcttgtcgacatgctagcccggacatcggcatcgaaggtttgccatcaagatagacgacccgtatatctaatactgtgcaaggcagaggatttggtcgtgttgggggcaatccgaaggcctgggagagcactcttgactgcatctttagaaggaccttctcaggcattatctgaacaaggcctcttgtcagtacaccaattaagcttcacgtgcaagactctttggtaatacccactaagaaatagaaaattcaagatgcgcaaattgctgggttgggaagcaatcaataagagagagtgaatatctggatagatggtaatgatgatgatccagctactcccatgaagccctctgaatagttcatggagacaaacggcctggaagccacaaaggtctcagaggggccttgaatggcagagaaagcccaagtgtatgcctaaatgcagcaaaatcaaacctccggacattgaacgaattatagagaaagagctgatatatctcgaatgaggtgcgactcatatcataggccattaggtatattacctgttgttacttctcctacactaagacctagataacatccagcccatatttgagcagtagactaggcagaagtaggcgtttgttagcacacctgcggtaagatgggccagcagcatgcaaacaaacctagtacgtagagtcaaagtaatgatgcagactgcctttttgagttgatatacccacacccctaagatgcctgattcttgccacattccttaggcatttgatcaattggatactatctagcatctagcattgagatcccctttttcagaattgaactatcttgattattggtgttaaatagctttgggggatcttttaatgggacgacggtaagtgttagatcatctccatatggcttggtgggtgattaatcagatgttaatagtttggtgtctggtttactttaaattgacctcacaaatttgtcgtcatttccatcgtctccttgatctgaccttcctctatctacaattcattccatatcacaacatcttccctatcggacactcacgatgcccgaaagagagcctcgtcagtttcttccccagatgattggtgaagggatcattacctactgcccgtattctgatgaccctgtgttatcttctttttacaaagcgcgccaatgggtcatcgtggagaagctggatgaggacctatacacggttaccccagaggattccgaccaagacatgggccccgcatttactactggaaaatttctttgtcgccgtggacagcacggataccatgccttcatgcatatacacaaacaaatccctctgtatggcactgaattcaataggtcggaggatcgggagaatcaggcttccgatatgtctcccgtggagctaaatgccctgaagaagtttacagagaatgagtgtgccgctgctcctaaactgcttggatatcaaattgatatacaagatccgaccgaccttgtttctggcagatttatcatataccttgtatttgacaaggtcccaggacgtcctcttgaatttgacgagttctggagttttcccttacgcaaacgcaggactattcgtgagaatttcagagtcgcctatatgtttgttatacagtacaattatgatcacgttcttcgagctaactagaattagggaaattctgaggcttgggtaccagcctttggaaccatcctcattacagctcatatacgagagagaggaagatgatatgtatgttctactatacccctgatagcacaatcaccggttttgatatagctatgaagattgatgaagagccttactggacagacaacaactttgtgatatataacctagttctgcttccctcgaaatatgagaagtacgttcccaagaagaaggatatcaaaactgataagaacggctggaggtggtgagaaggagaattgatatcaaagaaggaaccatggggcaatctctgtcgctcggtctcatgtgtgtgaccaactagcttacaaagaatactaccaagatctatcacaaacgattctctctattcactttaagtactaggaaagtctcacccccgtagaatcgctcactacaatttctcaactcttcagtctacgtccacgtctctgtaaagctgtctccatagaaattccgctagtaggtcttgaaataaaggatttgggagtctttggttggaaatgtgttctgtttcggcgccccttccacaaatttctcctggaccacaatcttctgcggatatattgccaatatgctatcctcaccgattcacccctgcttttctaagctggccatatacttttttcaatgtatcggacatcacagcctgtctgcccagtttctaaatacgaagatgtcattcacgtcaccaccgcctaactgatgaaaaggataaggctgacgtcgagagcctcatatcttggcatcttggcatcttcaaagtggaagcttgacaatagaagcatttcaataatttttgacgattgcgcactgtactacttcacccgtgactagggttggggggaggggggaggtgagaggctctggacgtttgaaaattgcgaatctggagctataatggtttcaacggagcaactacaaacttgggaaagatcctcgagtgcgcctacagctgtcactgggtccgtgagatggtcagtgttacattcctataccgattcgtcattcctcctcaccatcccgtgctgtcgcagcccactctcctgcagaagcttcatcttaaccggaggaggagtcgatagtccaatgcaacgctataacgcaattgaagcagcaaatttgcccttgaccgaaatttctgttggttctctgtatttattgttgattttctccattggcaaacgtcggtccaccagctgcttttgattcccaatgagtatgtagactgtactggttcatcaaagactatgcagaactgacattctggacaacaccaggtaatagtgagaccatccttacagacacctcggtggtggcagcccgcggagtgagcgaggtgaagtcgctgcatttggatgaagggttagggggggactctcaggcatcgcaagaatcccaggaaccctatgatgatgtgttcacccctccaaccgatgaagaaaatcaaacattgcgcaaagtggccgccaatctcccgttggttgctttttccctctgcctggtcgaatttgccgagcgcgcgtcctactatggggcacagacactcttctccaactttgtggaattcccactgcccgaaggtgagcctcattttcaaatattcagtgtcgagagtgtcattaacaagtataatacacaggtggcaatggcgccggtgctcctccgcgcggaacccaaaagacagccggagctctgggatggggattacaggccagcaccggcttcgtgcttctattcaaatttttggcctatattgtccccatcttcggtggttactgggcagatacttatgtcgggcggtataaggccatcatcattggtgtgtttatctgcggcgttgcccatatcatccagatcgtcggcgcgattccctctgttctccagaaaggcaaagccaacgcagctccaccgtttgtcattggcctcttacttcttgccatcggtgccggtattttcaagccgaatatctctcccactgttctggaccagcataaatcccagacgccgtacgtgaagactctgaagtcgggtgagaacgttattgtcgaccccgaaaccaccaatactcggaccatgctgctgttctacatgtttgttaacattggtgctttctacatgttagcgacaacctacgcggagaagtatgttggatattggctttccttcctgctatcgggtatcatttacttctttcttccaatcctcctccttgctgtctataaaaggaccaaaaagcaacctcccagtggaaacaaagagctcgccgaagcctttaaaattggatggactgctcttgtacaaagcaaattccagttctggcgcaaagacttctgggatttagcaaaatctgccaaccttcgcagtaaggggatcgaagttagttggacagatacctcagtatcaaaagttgcgaaaacaattggtatcatcatccctcaggcatattgatcaacgaattctaacatcattaacagaggcatgcgacatcttctggtttttccccatctacaatttaaacgacggtggtatcggctcagtcgccacgaaccaaggcgcatcaatgatcacaaacggagcacccaacgaccttctcaacaacttcaacccgctaacgattatcgttgtcatcccgatcctgactttcgtgatctatccgttccttgagcggcgcaagctgaagcctggctccataacccgaatgacgattgggttcgctgttgccactttagctggcatagtcggtgcactagtccaatggaaagtgtaccagctctcaccatgtggcactcacgcatcaacgtgtgacgacgtcgccgatatcagtatctggtggcaaattcccaatacatctctcagcgccataagtgaatgtttcgccaacgtcacggcgtacgaggtggcctatgctcgtgccccaaagagtatgaaaggcctggtgattgctgttttccttttcatgacggccctatctagcgctcttggtgagattcttatcccggcgactgcggacccatggttgatctggatttgggctggtcctgctgtcgccctggcggttcagactgttattttctggttccggttcaggcatttgaactctgagaactacttcgccgataatgttgtttctgatctggttgaggaggagcaagtgtcacttaaaagggaagcttgagtttcatcgtctaacaacgcaaagattggagcggggcactgcttgtcttgtttcatggatgacgaagtgcaatatatttgccaacttcattcactctcctctactattcaaatcttttcggaagaacgcttgacttaagatagacagaccttctctgtaatcatctgactggagaagagtcttgtgccggctactgatacggttacgttcgagtaaaaccaagtgaagtaatggattttagtagagcagattatattgagctatctgaccggaacatagagaattgtcgcaagttctagtccaccgttgtggagccaagccaagcgcctgtgataatttccaatccgtctttcaaccaatccgtttccaacgttgttgcaaagtcgaacccatggtcagcatctaggccatgaagcttaacaattgcatcgggcgctttttctcgcactaaatcaaagaatcgctgggagccctcaaatggcacagctgaatcctgctttccatggaaaatgaaagttggaggaagtttcagacctccggcagcagcgagattttcaaccctcttcatagggaagaggtagtcttctgacccgaggaactctagcaatcgaccattttggaaaatcgagaatgccagctttagacgatctgggggatctgcagcagtagccacagtgggcaagggtgcggttcgcatggctgcaatgtgttcttcaataatttcattcggcatgttgggaattccaaggatagttttgggatatgcctctgtgtagaactttgatttcaaatcaagaactggataggctgcgatgacagcacgaatttctgatgggtagctgagtgccagttgaatagccagatagccgccttacactcaagtcagatcatttgttcatgcaagagttcactacaaaagactcacccgcgctttcccccacaacgatgagcttgtcgagatcagggacaatatgaccatatccagcatcttcgattgttgcagcaaattttgtgctgtgtatccaatgccaaaaatcgtccatgtcttccaatatatcctttcccgatacttcaggcagcaaacggtagtctggagccacgataattgcccctgttgatatagcgtagtccaacgtccaattcgcgaaccaaacaggatagcgactagaaccagtgacctacaggcaagttaattcacagtcgaaggattgtgtagtcttcttagtgcaagtagctcataccaaaaatccgccatgaatccgtatcatgactgcacatttcgaaagttcttgctgtgatagtatagcccgagggatgagaatatctacattgatgtgagaacgaccctggttgaagctcttataactcgtgttgatcacttgaaatggctcatatttatcagcggtgtcaaacttcgagaaaatttccaccaagtggagataaggatcggttgccatattgatgctcgatatgggaggagatagggcaaggaggtggggttgttcgttcgtttatgtaccttgcgccttcgcatgacctaaaggggaaatggagcgaaagcgaagagccgagtacatacgtaccccaagacccgcaaggttcggctagtctgtaagtcatagagctacggacttgactaagcaaatgaaagcatagccgtacgatagatggcagtatataatactggcattgttggaatcttgcgctttgtcattgaagtctagttagcgactgcacgaactatgcaaacaaaccagcagatgtaattgtttcacagctgaatagagatgtacatggtgcaaacagagcaaatagagcaaacacagcaaacagctgatcggcatatcggcgatcggcgcgttcccccgctgtaaagtgattgcgtaactacaggaaaaaagaaagaacctccaacaatttggctatttcggcccatttatctgtccaagctgcactgtaacttattgcgatctatacctctccattgactcgccatcgatagactggaacctctggttaaccgacaagatgggccaggacatgtccccgccacagggcgtcacatcccttctggacacggatctatacaagctgacgatgcaatgcgcggtcctcaaatacttcccggatgtttgtaagtagccctaaccgagtaatggggatctgggctgatctgggcgcagatgtggcctacggctacacgaatcggaccccgcagatgaaattgcatcgcggggcatacaaatggcttctagagcagatggacagtaaggatatcccttcttgtcgcaatcgtacagcttctaaccaatttgcgtgtagaactggccgtaattcgcgtcaccgccgaagagcgcgaatggctccgccaaaagtgcccctacctcaatgatgagtacctcgccttcctagagaccttccacctcagaccctccgagcatatcaagattaagttcattccggaagaagatacgggcagcgatgacgacccaggagacgtggagtacatggttgagggtctctggctcgacaccatcttgtatgaaatcccgctgctggcgttgactagccaggcatatttcatgttcaccgacaaggactgggactatgaaaaccaggaagataaggcataccgaaagggttgcactttgctccggaatggctgtgtgttctctgaattcggttcgcgccgtcgccgcgactaccatacccaagatctggttatgaagggactctgccgtgcggcagaggagggaaagaagcagggctggcccggggtgttagccggaactagcaatgttcactttgctatgaaatacaatactagtgccgtcggcactgtggcccacgaatggtatatgactattgcggctatcacggatgactaccagaatgccaatgagttggcattgagctactggcttggctgctttggagagggggtatgtattgtcaactctccggtatttagaaacacctcaggctaactagagaaacacaggttcttggcattgctcttactgacacctttggcacaccggctttcctgcgtgcattcagcaagcccatctcagtaccaaatcaaaagggtggtactaatccgagcacgacaacctacgctcaaagctacaccggtgttcgccaagactcgggtgaccctgcgttcttcatcaagatggtccgggacttctacgatagccagggcattaccgagaccaagacagtggtattctcagattctctggatatcgagcactgcttggagtacaaaacaattgccgaagaggctggcttcaagccaacctttggagtgggaacattctttaccagtacgtttgagttttgcaatctcctgcaacacaaactctaacgaattcgcagatgattttattaacagatcaaccggactgaaatccaagcctctcaacattgttatcaagatcgccagcgcgaacggcagtcccgctgtcaagcttagcgacaatctgggaaagaacatgggcgattctgagaaggtccaggaagtcaagaagaagctgggctatatcgagcacgagtgggaagagggtgatgagagtcgccgctggacgaaaaaggcatagactgcctgcctatctgcaccatacaatttgcctttgccactaaatcataggccatttgctaaagacttggtaaacatgagcccatgatcatattgatgttggagaggtggttattgatatttgctagaaataatgtgccaactccatagagaataagaatacatgatatcctgaagaggtctgaattccgttcctccgcaacgaggctctccagtgaggtacacccgagccatatgcactaaaagcacccaaagcttagaccatctcaccttcctcattttctccgttgccttcgtcacttcgttcgcttgttcgtctccaacgtgctcatagtatcctatctgagccatgggggttggggattatttccatttatactcacttttgttatcgttccttcctcgggcagaaagctatgaatatcttccaatagttgccaagttacacgtcaagggacgacaacaaaaatcctaatttgttatacataacctagaacatatcatccccagactcgaaccccaagtcccgatctagatcgccagtgatttcgggccttgcatcattcattgactggtgacgaaaatgcattggatgaaagtcatctgtatcattcaaagtaagacagaacgcatcgtgattgttttgatcttgatctagtggaggtgttgccttttcaggcatgcggaaggtttctgtgttactgtactgattcagatcagtgtcttgaaacagctcctgtgcccagtcgacggtatcttggtcttggggcgggggtgatatatagggtttatcttggttgttgtttggattgggaggggtttgaatatcacggaaggagtcgatgtcgatggacataaagttgaaaggattgttgtctatgatgccaagatcggaatcaaagtcgaagtcattagggaatagaggaggtgcgggttcatgtgtggtttcgacgctgggcttaatatgatgtatattcccctgagcagatgaagtttgtgcttgcggcttcgagatcttggttacagcaggtagatgtgcttggggttggaatatggaattgacattgcttggtttcctggtcgccaaagacgttgcaggggcattcaagttgtattccatgacttggaagaatgtactagaggcgcccgcctgcattttgatagctgcctcgatgttggcgaactcttgactggcggccggataaatatccttgagacagtgaaggccttggatacaacgatgaaagttgtcgacactgctttcgcggacagcggggtcctcggacatggtgttggtcaaatgcgccacagcggcaggtagaatcacagtcactccagactgcggtagaaaccttgtcaggttgagctgattcaggccttgaataatatgtgtgatccccgcggcagcatcgttcatttttgtacgggcagcattgcgccagtccgtccgcgatttagattgatctttcaaagcagtcgcccgaggtcggtgaagtgcactgctggtagcatgatagagcatacgtaacatcgcaccatgaagcagcagcacattttcaccgtcatagaaggtattccccgacttcgggatgaattgcgcatctttagggagggcactaagccaagagtcgagcttttggccgcatcgcgcaaactcagactcggaagcctgtcgagggataagtgtgactgtggttcggtctgtggcaccaaatcggcactgagatggtgtatattgtgcgaataataccctaccaatacattgacagagcttcaccttctcgatgaacagggtggcgaggcgtttctgatgtgacacatcttggagctgacggcaacagaacttagccaccacatatggagagaaaggttcaaaatcaaaatcatccattctgagcattggaacactgctcgttccatcattaacctgaagcgggcgccgcatacccatggcgatcagccgatctcgagagtacagacaccaccagagccgagaacggagccgttgagtccgtatatcaatttcatctgatgcagggtctttgttcaaaccgattgactgtgcttgtgtattacatactccaatccaatcccatatatctcgctgtgggctgttctctgaatcagcccagtaggtcatcaataggagtgcttggagaatcacgatgcgatcctcttcgcagtcgagagaatagagtaactattgatgatgagttagttcactgatgtcgcagccccttgaagaaagacaaacccttaatcgagtatagaacgcattacgcgcacttttccgggttgaatacccagcatcctgcaggtgcttaaggtcgacgaaagccgtaccaacaaacatgactgcctgaaatagtaagatgctaacatttccctctgggtcattttcagccacacagcgtaagaactcttgcaggttcaaaactggcatgaaactgtgtacccattggatgtagcagcgcagaagctcatcccgcaacccactctctggaattgagacggcaccacgaaatcgtaagaactctaagtcttctggggatatgcgagccggcaagggttttaaaaaccggggctcgtcgtccagtattgccgtcagtgggtcaaagtccgggtctattaggtcttgaacggcagacaccatgtttgatagaggcatcgagtgctgcacattggggttcccccgtgtacgccatatcccggcaggttctgactcgtgtaaccatggggattgcggatcgtatccatgaagatggtggcgcttagccgtgggctcttggcaagattctgccaacttacgtttgagagaagttgaagacatgggctctcaggtgtgatgtgtcatgtggccctggttgggggtagacgtatgcgattttgttccacagggacctcaacgcataagcctgcaagaaggcggtgttcggaactggggaaatgtgggggcaactctgcggggtcttggcgcctggggaaatcggcccaaatatcgttggcttgatgtcattctgctccattggggatttgaattggtgaatctagttggctggatcagtgatctatatacgatgagaaatgaaattattatagtccaccagtttttgaccatcgcttcttcatataaataaagtacgtaggtcactatacgtactattttctccagttagggattcctattgcagcctcacttttataaggccctcggagtcagcccaccgagtagtttcaaaagacgcccgtgataaatttgatcgaaatcatgatatattaagtactcagttcatactcaatccgtcagtcggtactcacaataggattatttgtgaactacttcctgatcaccatatgctgcatactcctactccgatcgccgccctcaaaatatccgttacaacaagacgaggcaaagaaatcaagtcgcagaaacagcctgttggttgtttatttagagttgcccgtgcgtaagtggtatattccatctttggacatccacatagcttgccttcactctatcttattggccacggcttgttggttcctttgcgcttcttcggatacttgctcagtcatgggtaagatattgtgtttttctttatgaaggatgatcgctaagcgctacaaacaatcggaggcgaggggctatatattggcgctcatatagatgacatactatctgagagaaagatagagagatggcttgagccaagttgcggtagaatggtagaatggtagaatgggaatttctagtgtcattgtacaattggatagacaaggtgttcagcgatagtaaaatatatatcgctgcgtgtttcaggcatagattcggcattgctataattctgttgttttacctcatgtatcaattggcgtcttattctacactgttagagatttaataatcgacacaagaaacgtacgcatccatctcaacttgttgcagtcgctgatagctactcatctagtgttgtcagccgattttcaagatttgtacaactgtgctattacaaagcgcagtcggatatggctgttgcctcagagatctagtttcagcctcttccaaatcttgagggactaggtcataattatcacgggccaaaaattggattgtaccacagccggacatccagcaaatggcaaaattcctgatattcgtgaatctcaaaacaggacacagcatgtcagatagtacatgccctgccaataaaatattgtacaaattatccaatcgaaaaacagccgagcgaaagatgctcccgcatcatgttttcctttgaccgacgccgatatgcttccacaggtttaaaagagggagtccgagtcgtaccaccggaggtatagaaagcgtgatggttttacatgctgcgcgatattagatgaggctcgttcggttgatctcgatgcaaatgtgttgggttggctcgacttacggaggaaggaggaattctccgaagcttgagtggaggaacgcaataccggcctaaagatattgtcagtttcatggataaaatcgagatgttaaaattgttgattaggcaacacgtacgccgaagatcacgatgctgcggacaatggtcttgttctcggggttggtggcctcgtcgtagacagtgcggacgaagcctttctggggccgagagccagagggaacgatgcgctggtgaggggccattttgtatgtgatgtgagggacgaatatagagaacgtatgttgatgttggtgttggagtgatgatcggacgtcgagaaatctgcggcctcgggacgcttggtcactgcgcctttagctcccgtggacaaccgtatttattttgcccgcgcagtgaaggacaatgcgacagcgtcgtctggcctgtcctttatatctagatctcctcactgctgcttcggatatatctctcccaaaaccaatacttctacatatatcactgccacggatagtggttgtctccacattgtccactgaaccggcgttttcgccgcagcaaccaagatgaacgtcgatgagctcttcaaagtgagttccaagttcacctactgaattgatggcatggctgatgagtaaagaaatcatctgcaacagggagcgctaagcgcaagttcgagcccgtccaagatccaagtacgccctttcctcgcaatgcgcttgccgcaaatcctgacgatgacagatgaacactacaaatcagcaaaacttgaccccagtggcgatgtaagatcaaatggaaaagcaccaatggtggaggacgagattgacgacggtgaagctggacccgagcttcctccggacttcgaggacgacgtcccagacgacgaggagggccgcttcttcggcggtggaatggagcgcaagacagcccaagcaatggaatacatcgatcagcaagaggaggacgaggctgcggtatggaacttttggtacacatggtatctatccaggggctgacggtatacttatctagcccgagaaattcgactctgcgtgggtgcgccgttttgcattgaatttcgagaagaagatatccaagaacgctgaactacgagcaaaatttgagaatgatccgcaaaagtaagtggataccggacatttgtatgtaccgggtgctaatgatgcttcaggttcatggcttccgaggccgacctagatactgaaatcaaaggcttatcaatactgtctgagcatcccgacctatacgaggagtttgctaagatgggatgtgtggcatccttgacctctctcttgtcgcatgaaaacaccgacattgcaattgatgtcgtccaaataatcagtgaattgacggacgaggatatggaagcagagcaagaacaatgggatgctcttgtcaactcaatggtttgttgaggcatggaagtatcagtaccaagtgctaactatcactagatggaggccgacctcatcgaattgttggctcaaaatctctcccgacttgatgaaggatctgaaacagatcgagtgggagtatactacgtgttaggtgagtatcatgtttcaagaaatactgcgagaattttctaattcaataaaggtgtaatggaaaacctggcctctcagacatcacacgcggagaaaattggacaggacgctgcaatcttgccctggatcctgtcccgtattcagcgaaaagaagtgattgtcagccaaaacaaacaatatgccgcagagattctggcaatccttttacagtccaccccaaagaatcgcacgaaatttattgagctcgatggcattgatatccttctccagctgcttagtgcataccgcaaacgcgatccagctaaagactccgatgaggaagaatatgtggagaatctgtttgatgctctgatctgccttgtcgaggaagacatagggaaagacaaattcgtggaggccgaaggtgttgagcttgcgctgatcatgcttaaggaaggcaagttcagtaagccacgtgctttgagggttcttgaccacgccttgggcggagtgggaggtgccccggcgtgcgagaggttggtggaagtagctggcctgaagacagtgttcgggatgttcttgaagaaagtaagtttgctctctcgcagtcaaattgtggtatgctaatatccatccagcaagaaggtcaaaacatcgaacatttcttgggaattttcgcctcccttctccgtcttctgcctggtggttctgctccccgcatccgcacgttggccaagtttatggagaaggactacgcgaggatcgagaagcttatcaatctccgacgcgagtatgccgcacgtattttacccgtcgaacaagcgattgaaaaagaacgcagaacgtttgataaggaggagcaagaacttatggctagtgaatggctatcaaggcggttggacgcgggtttgttctcattgcaggtatgatttctcttttgcgatggcaaggctccttgctgacttgctgcagacaattgatgttattttggcgtggctcattgccgaagatgatggagcgaagaggaagatcgtctcacttcttgcggaccgtgacgaagatttgtccctgatccgtgggaccttgcaaggtgagtaatccacattgctgtaattgccggaggctaactcgagtagaacaaatcgaaggtctcggagaggatgacctgggtcacacagagttgaaggacatgctaagcactcttttgcagtttgtttgaacaatgacagaattgtaacgtatcataataccaatgctatcagcaaatccaatccacagggtcacctcggcgccagtacacatagatttcactaagatctaatattttcctcggattgaaaagttagcttgttgatatagacatgtagaccaaaataccatcacatatgtatagagatcttagtatcttaactacgctgcttcgaaattatgttgacaggtagaaaattccagctcatgtacgaccgaatcagttcagaattccgaactagaagatgtcaacatgattatatgaaatcgaagtatgaatccaagatatttaatattccttaacaggaatacgtcccattgtccgttatggagaatgggtatgtatgtacctaaggggtcagggaatgcgcctgacacaactttttgtatggataagatgaactcaacctttcgacgatcctgcgactaccacggctcgatacaattcgtcaaaatacatgatttcaaactccagtgctctttattaggatctccccttcgttacgttaccgcacaacctaacgacttgatccgtttcttgtctgtttccgtcctcgacgcgcaacacttgcgcgccgggtggcgtacttcgacacagttatggcgagtgcgtgttcgctttcgctggttgaggtcgatggatccatcgcgtagggaattgcaggcgtagtcgaggagttctggtggtgccgcgctatcatcagacttctccgtagacaatgaagagttagccgtgggctgatttcggttttatatccggcccttcgctttcgcccctggcccctttgtatagaggcagttgtcggggagacgcttgataaatctgtacgcccaattgtaaccgagcttccactcgatcttatggcgactaagaatcgaggtagcatagtcgtgaatcatgtcggcaggcattgtccaaggtacgaatccactgaattaccgcctcctcttgctcagcatccaatgctttgtgggtgcctgtacggcctttttgcgattttgcaccattgatccgaccgcgcaataactggtacggaattagattcccgcgccaatttggcgatttttggtttataattttcagggtatgatcgcaaggcaattccaatgcgatcttccaattcttgggtttatttagtcatatttggggtgatggcaatgaataaactgtggtaggtatacaaaaattatgttgttgatgaaacattgcgccaagtggcttggcggtcatggatagtcacgtgcatccacgaccatattgctagggcggtgagatatgatcacgtgcatctacctcatcgagactagcgcatggctgagaagcatccagacatctggagatcagtcccttcatcggaatattgtcggggagcctctctttcatcccccccagtttgtcagccttgctttttgcatctgtctctgactccttgacttcataacaaccccactttcgaaaactgtcaggcgagcgttgcagtgcgttgggcgattattgcgaagctcctacgccgacgcgccttgcgcttttctaccttcctacacctccgatcctcattatcttaatcaacacctaacctcaatttatcgcaaccatggtggaatacgaggagacatacgaggaggatttttacgatgaggcggacgagggcatcacctctgaggattgctggacggtgatttcgtccttctttgactcgaagggtcttgtctcccagcagttggattcattcgatgaattcatctcttcgaccatgcaggagcttgtggaggagcaaggccaggtggttctcgaccaaacactccccccctccgaagacgaaatcgaaccgatcgttgtgcgccggtatgagctcaaatttggcactgtcatgctttcgcgcccatccgtcacagaaggcgatggtgcgaccacgatcatgttgcctcaggaagctcgtctacgaaaccttacttacgcttccccactttacctcggtgtcacaaagaagattatggaaggtcgtgagaagatgggcaagcccaacgacgacgacgataatgagggcgagagtgatccaaagactcaaggtacatacctcgattgggaaacgaagcagctgccccaggagcagatgaaggaggaaacagtttttatcggaaagatgcccattatgctgaaatctaagtactgtatcctcaaggatttgaacgaagcgtcactctatgcttggaatgagtgcccctatgactctggcggctacttcgtcattaacggaagtgagaaggttttgatcgcacaggagcgcagtgcgggcaacatcgtccaagtcttcaagaaggcaccccccagcccgacaccatacatcgccgaaattcgaagtgcagtcgagaagggctcacgtatgctttcgtcgcttacgctgaagctttttgccaagggtgacagcgccaaaggaggatttggcccgacgattcgctcgacgctcccatatgtcaaggccgatattccaatcgtcgtcgttttccgtgcgctgggcgtcgtttccgatgaagatattctcaaccacatttgttatgaccgcaacgatacccccatgctggagatgttgaagccgtgtattgaggagggctttgtcatccaagaccgtgaagttgccctggatttcattgccaagcgtggatcgtcacagacgaacctgaaccacgatcgtcgtgtgcgctacgctcgggatatcatgcagaaggaattgctgcctcacatttcgcagagcgagggcagcgaaacccgcaaagctttcttccttgggtatatggtgcaccgacttcttcaatgtgctttgggtcgccgtgatgttgatgaccgtgaccacttcggaaagaagcgactcgatctggctggtccacttttggcaagtcttttccggactcttttcacgcgagtcacaaaggatcttcagcgttacgtgcagcgatgcgttgagaccaatcgcgagatttatctcaacattggtatcaaggctagcacattgaccggcggattgaagtatgctcttgctactggtaactggggcgagcagaagaaggcggcttctgccaaggctggtgtatcccaggtgctgagtcgttacacattttcctcgtccctgtctcatctgcgccggacgaacacacccatcggcagagacggaaagattgccaaaccccgccagctccataacactcattggggcctggtttgtccagccgagacacctgaaggtcaagcttgtggtctggtcaagaacctggcattgatgtgctacatcactgtcggtacacccgccgaacccatcgtggactttatgattcagcgcaacatggaagtgcttgaggagtttgaaccccaagtcactcccaatgcgaccaaagtgtttgttaatggcgtctgggtgggtatccaccgggacccttctcatcttgttacgacaatgcagaatttgcgtcgacgaaacatgatctcccatgaagtcagtttgattcgtgatattcgtgaacgggagttcaaaattttcaccgatacaggacgtgtctgccggccactcttcgttatcgataatgaccccaagagtgagaactcgggcgggttggtccttaacaaggaacacattcggaagctggaggccgacaaagacttgccaccggacttgggcccagaagaacgccgtgaacaatacttcggatgggatggtctggtacgttccggagcagttgagtatgtcgacgccgaagaagaggaaaccatcatgattgtcatgacccccgaggatctcgagatctctcgacagcttcaggctggttacgctctgcccgaggacgaaacgagcgaccccaacaagcgtgttcggtccattctcagccagcgcgcccacacctggacacactgtgaaatccaccctagtatgatcttgggtgtctgtgctagtattattcctttcccggatcacaaccagtcgccgcgtaacacatatcagtctgctatgggcaaacaagccatgggtgtattcttgacgaacttttcgcagcgcatggagaccatggccaatattctctactacccgcaaaagcctttggccaccacccggtcaatggagttcctgcgcttccgagagttgcccgccggtcagaatgctattgtcgctattgcaacttactctggttacaatcaggaagattccgttatcatgaaccagagcagtatcgaccgtggtctgttccgcagtcttttctaccgcacctacgcggacaccgagaagatggtgggactgcaagttgttgagagattcgagaaacctatgcggattgacacccttggcatgcgcaagggtacttatgacaagttggacgaggacggtatcgtcgctcccggtgtgcgtgtctctggagaagatattatcatcggcaagacagctccgttggctgctgatgcggaggagctcggtcagcgtaccaaggcacacacaaagattgatgtgtcgacgcccctgcgcagcaccgagaacggcatcgttgatcaggtgctgatctccactggtaatgacgatctgaagttcgtcaaggttcgcatgcgtaccaccaagatcccccagattggtgacaagttcgcctctcgtcatggtcagaagggtaccatcggtatcacctatcgacaggaagatatgcctttcacccgggaaggtgtcgttccggatctgattattaacccccacgctattccgtcccgtatgactattgctcatttgatcgaatgtcagctcagtaaggtttctgctcttcgtggattcgagggtgatgctactcctttcaccgatgtcactgtcgactcagtgtcccgcctgctgcgcgagcacggctaccagtcgcgtggcttcgaggttatgttcaacggccacactggtcgcaagatggtggcgcaggtgttcctgggtcccacctattaccagcgtctgcgccacatggtggacgacaagatccacgctcgtgctcgtggtcctactcagattctcactcgccagcctgtggagggtcgtgctcgtgacggtggtcttcgtttcggagagatggagcgtgattgtatgatcgcccacggcgccagtgctttcctcaaggagcgtctctttgacgtatctgatccgttccgtgttcatatttgcgacgactgcggcctgatgacaccagttgcgtgagtattccgattcttcatttatacattttcgtcacacagaaaactaaccgtttttatagaaaactgaagaagggtctcttcgagtgccgtctttgcaacaacaagcaccgtatctcgcaagtccatattccctacgccgccaagcttttgttccaagagctggcctccatgaacattgccgctcggatgttcaccgatcgctctggggtttcggtgcgttgattaggttgctcaatactttacatttgtactttaatgatcttgctggaaaaatgcgcatctgcttggcctgtttcacggcgtctcggaggatcgttggccatcgcattagaataaccggccctacatacttgaattgaatcactttacgtgtggttttcccaggagagtcataaataaacccgacaccctgtttcctgctaccgacaacccatcttgtctgtttgcagctacaattacggatcataatttacagtgaacatagatgcaggtcgtatctcattattcattgatatctcagagtaagacctaaaccaaagcatgaacaagtccatgacatcgcggcgatgttctttggttgacgagataccgtttgtcttggtcaggccccctttgggtctaggaggcccaggacagatcttgtcatcttatggcttgtgctggtcacattgaccggcgcaagataagcttgtcggagtccacgaggctggatcggatgatccagggtggacgttgtctacatcgatgtattgggatcaatgtcttcgtcttcctctcaccacaccattatcatccccgcccaaccgcagcgcgaaaccagtacacctgcggtgcgggctgtttttggtttatcattttcagaaaagaaaaaaaacacaaaacaaacgcaatgaccaagtctcaccagaccggaaaaagtcaagcgaaagaacaaatagagcaaacaacctagcgaggtccaggacctgccggagaaacaccatctaccggcggacaacaataccctgacgacgaacggcattgcgagcacggcggtactcctcatcactctcgcaatcagactccgaacagctgtcatcagaagactggtatccacagcgggtaccaccacagtcaagcttgacacggtcgcccttgcgggtgataccgtagcgctggcagcggcagtgcacgggcgggtcgctcatagacgagagcgaggaaggcgaagtcgagcccgacgacgaccgcgacgaaacagacgacccggccgagctgggcgggctgttcgagtacgagtactcgtctgacagacgggagccggcgaagcggcgggtcagctcgtcgacagtcggggggaagtctgcttcgcggagttggcgcgaggcgtagttcttggttggcttggggtgctggatgcgcgagggggacagggcgcgaccggtcacgacgtcggcgcggctggtcttcggggcggaggaccggctggtgggcttgccgccggggacatcgaggatgttgagcttgcggccggtggttggctcgacggtgtattcgacggcggggtcgtgcgatacgtggtacccgtccatcatgtagtagtaccagtagcggcctccgagttggagcatggaggtctggaagcggaacttgccgacccaggcgccgggcttgccttcgctggagagggggatctggcgttggtagttgtcccatgaaccgaccaggtggacggtcttgacgttggacgaggtccggagggagaacttgagttgaacggcggccatgatgaatcaaatgtatcaaaaaaaaagttgtttaaaaaaaaggtgtcgtagggagcagaagatcaagagtatcgtatagttagaacaatctaaaactgccagagtttgattgtcaagtcgggatattggactctttgatctttggggaaccggtccgacaaagaagaagataatcgagcgagattatattaaagggtttgttgtagatgtctgttgaacagcgaaatcaagtcgaccggcgacaggtagactgggaatagttgtaaaatccgaggaaatccgtagcaagtatatcccaaagagcacagctcgtttgagggtagaaagggtaaagaatattagaatagtatagaagataaagaaagaaacaaaagtccaggcaaccagtgctcaggataactcgaataggacagagaaacacaacaaacgctcgctgaagaagaaaaaagagaagaaatctgcctcgaggtggctatggcattcttttaagccggtcaattcgatcagcagtgcagattccgtcctggaacttgggcgcgtaactgacgatgttggttggttggatgcaagttgcactgtgatgtgctgccctcatgcctctggccaatgactggccaggatttaacgctggtggccggactagaagaggggagagtttgtgaatacgaaaggccattgtccaagcagggccagggattcgaagtctgaagaagttgtcagcctcggtagattaattgtggcggggtctttttttttgcagggtattgaaagcctaatagtataggtagaacagataagattttctggatatgaacacgcaaagtaatattcggcaatcatttctctgagcgacagattcaattgataattgaacgaaaggcaggcagacaggactaaaaataactaagtagaggggtccttaggtgtaatcgtcctcgctaaagtcatcgaaaatccagttttcttgaatccttgttctctcctccgtttccgccatatcaagagcgtccgctctcaattttctctcgcgtgcttttgcttcgtcatagtgtgcaataggtagttacccacccctcatgaccaactccaacagcttcctggcaagcctggaactgcgtatcagcttccgactgcgcccgttccagtcgcagacattcaatcaactcattatctgtaaaagaaattggacagggtgccttcgcgctatggctcacctccgcctacttactaaacagagtaactagatctgctttcaatgttatattgtcaccgtcctatgggtcactagcgtgatggaaaagacgtcgtcgtaaagtactaatcaaggtattgtaataccctagattaatatctactatcattttgatacagagatagtcaagttaacgtctgcgtagagtttctacttactagaatttttctatatctatcatatcattgaaattattattcggtaaagttgggattcgtagtgattccgaaactttattactatagttttgtagactatcgggaatagtatattaaaggaataacagaagaattgtggtatactgccaattaattatccctttgatttctatattattagaaataaatatattatttggttaaagatcgggatattatatagtaggacgttggagggctagacagtctcgcggtataagataaggagtaatctagaggtaattttatagagctataatatgattaaagtaggactaagcttagtaactatatagctctcggtaaagacgctaaaagagttcaagagtccgcctaaatttcttaagatatacaatctcttttaaggtaccggtagtaaggaccgctagagaatctcgatcttcctaagtttaggacatctcttctgaaaagcttgatctaagggatacttacatagtccttatttaaccgatagattaagtcttttcctatactataatcgtagtgaagtatcagggctaatacagaagcgctgtatcgagtctaggcttagggtaatgattcggctgtctctatccggtaaatcgtcgcagtaatagaggcttctgtttactggaaattgtaagttaaatagacgagcctccaattgcacgaattttgtcactattgttcttctctcctgttcagacaaagcataccacacatcacctagggttttccttggacaagttccataaagatatatcctgtacctgcagaatggacttcgcttgcgaccacgagagatttaggcttagtaactgggtatggaattcgtgcgacaaatcggaagccgtctcgcatggtgatcagaaaatttcggttgaagcctccttcggcaagcttcaaaaaaccaacgacgtcgtccccattctgctgtatcgctagagcagtaaggcgcttcagtccagagacgttaaaaacacgtcccctctcacgatgtctcaacctgtcattgtagctagagttgcaaatcagcagagcagcttagtatggataagatgtaagtctgcaacatacatccatcgcccagacgtgtactcgaacaaatcataagggtcaggcattttccggattatcgagacaggacgtgcgagcaatatcattctagatgtgacgacgcgtgagaaaagaagaccagaaaactcacttcgatttagatgcttggtcatggcttgatcagttgaagaatatcctgaagactttggacagatggggctttatatcgtcgcgacccttgatgcgcttctgtcgcgtaggtacctaggtgtacgtaactagttagacctacctaactagttagttactccgtgactacggagtagttgtagttaattaactaatgcagtgggggtttccagagcaggatgactaagcggccctcctgaggcttagcgcatcatctctttaaatacggagtactggatatgtcattgatttggaaactacctcttcgtgatgcccccagggagctcgcactaggcaaccgtcttcgctaggctgttgggacaatatattcgtgccttctagtagtatcccgttgttgtgtggtcgggttaccccacaacgggccgcaccgaacagccacgccagattcactttagtcttcccagcggggattaacaccagacaatggaagcctagaggttcaatccatttatcattggaagccagaaaatggatccacaagttgaatgcttgatgatcaacgtacaagactcaagagacgaaggactcgggtgaaagcatttaacgcgcaattccatagttgaaacataattaggccatgcaggcagggtataccgcaagagctaagttatcaatttttagtacagtttccagatgtacacaaaggtggcaagagaaggacttcctataacatttgaattagtatgatattgacctatttagacggtaggcaaaatctgatatgacacactggtggttagagactgccgtaggccgcagttctaaccaacacttaatacatcgtctattatccgttttcagaagcattccctctccaaattataggcagtatctctagtaatctggagtgttcgaggtaggaacaaacatctagacttcggacgttcacggcgccgatccgaagatgagtcattaatgagtcagcatacctccgacttcaaccaatttgtttccaatgataagtgtccaaatatcgacgcgagtacaggccaggcgttcatctggtcatttataatcgacacaaaaacatcagtatcaaaacaagcgcttccatcgaacccggttgaactgcacatcaccactcagcatcccggtaggagccaccttcaacctagcctgcgaccgaatccaaaatggcacacggtgcggaggactgcgcaactgttctggagcagtttgtccacgatgtggcaaatctcccggctgagctcaaccacctcatggaggaaattcaggctaaggacaagcttatgcaggaatgccgcgctacaatcaactcgcgcgacagcagcattcagaagttcatcaaactgaacggcagtctaacaccgaacccaaaggaagagccatacagcaagactattctgcaaaatatggataaatcacacgagctgcagaacgagaagatccagcttagcgagaaggcatgcgtcctccttgatcgccagatcaaacgactcgacgtgcgcattcgcgatctagtcaacgaaggtctcctcaccaacgacccgcctctcccttccctcttcgactccaaaaacaaataccgcaacccacccaaaatcttcctccctgactccaccccctccgactccaccgcgtactcaacacccctcaacccaacttccggaaacgcgaatgccatcctggctgctgcgcagcgcttgaaccaatccacagcacctcgtgtcaccggttccgcagcgcagctcggacaaaccacagcacgcagctctgcacccgccacacccgctgctgctgctgtcgtgcaccttcagcaacgccaacgcgaatcctccgctggcgcagtggacagcaagcgccgccgcttgaacccatccctcaacacccttcccgtagcctcgtcgaaccttcgccagtcctccatgggccctggtacaccgaagccgggcacaccggctggcagccgtgcaggcagtgccggccctcgtgctagcatgggcatcaagaaggcattaaccaaaaaggtcgcaccgcaccatcaagtaaagaagctgaagactgccagcggaaagccgatcaagcgctcttctagtgctagtggtcgtatcaaggcttcgaagaaatctcccaatggggagggcgatgaggatgatgactccatgctcagcagtgccgatacatcggactccgacaagagtgacggtgctgctgatgaggatgtcgatgatgaggacgaggatgagggtaatgaggattcgaaggtctattgtacctgtcgcactgttagtcatggggatatggtggcttgcgacaatgatgagtgtccctatgagtggttccactggaagtgtgttggcttgacgcgcgagccggttgggacttggtactgtgacgagtgcagacgtactctaggcaagtgatcctgttctttttctatgatctgtatgacggtttatatacccatggcgtttctgtacttgttgggatggactggacaaagatatgtacttcttaccaattttactgcatgatttaaatctgcttcgaaggaatcaatttcatattctgcccattctagacaaaaattgatactaatccctaagggaaaaggatgacaagaagcagaaatcccaccctaggtatccattcccagctatagccaagcgtatgtccaagccgtgcccatccagcgcccaatatatccccagggtcacagggagccggagcctaaccaaatcaagtcgaaaacgccatcgctatgcacatgtcccctttttttttgtttcttccatgcaaacatgttggcacacaggcgcacacagtgcgccgaaagtcagaaattagatattcgtggaaaagccattgctcgccaatccactcaaaacccaagcccattgttcagccacggatcgaagtactcgcaggtctcggggcttaccgcgccgcctggcgcgcacaaccggaacactgggcactggccgcaaggggcttctgtcatgccgttcttcacgaggtgcttgtttgcaacggagagatcgtcgccctcgatgggcggcttgcgggactggttcgcttttacggcgtcggggcttttgagagatctataccactcgccgttgcctaatgcgacgagcttgttgtcgtaacagagcatttcgaggagttgcacaacgctctcttcgcccaggcggacaggcgtgatgccgctttcgttgactgccgaggcgatctgcgccacggtcgggtatcccgcgtagccgtgggggtaggggaggtaggttttctcatcggtcttgacgtccaccttgccagaggcggttttgatgcgcttcttacggtctgaggcggggacttcgtaccagcttttccggctcacggtgtactcgatgtaccctgcgacgctgttgatgaagttggcatccagtacaccgtccgtaaaccaggctcctccggttacctcttcacttggagcaagcccggccaacatgtacatcttgcggctggggtatttcacattgtggagagatttgatgtagttttttccttcgagggatttcaggcatcgatcgaggatcgacttgtgcaggttcgtgcggtttccaatgtgccgcacccagatgcctgttcgttctgtggagtggatgacattgtagaccatggcctcgtccggggtaaggttgcggagcctggagaggaggaggggttagttatgtgctttatcgactgagatgtgtctgcaattcctacttctcggcatcctcgcggtcaatgagcttccatgtgagctttccatctttttggaggaggcgaaacagattttgattgacgaggctctgggtgcattctagcagtagcgcaacgtcgttctttgggatcactttgagattgaggaagtcgttctgatagaacaagtgatcggggtcaaactcattcacgcatgcatcatagagctttgaggcaagctcggccacttgggaccccgcggaggccattgttggagatgcgacggagatatcaggcaaaatcaaggttcattcgaagaggctcgtgggttttcatgttcaaggaagtgtgctagagccagggagtaagttagaggaccatggtgcgtcgatgtcggcaaatttgagtcacaaaagaatcacaaatggtgttttttttggcgactttttctcggcggggaccgactttgacccaaaagggtttagccccgtgaagcttcaagtgtcagcgtccgtgcctgaggcttaataattcctgcctgaggcagtagatagcaacggaaatttcgagaagctccggccgttgagctcatgacctcagcactttcagttccttgtgatcttatttttgatctgcatttctcccttttctgagcaatttagcatatcactacaaaatggctgacgctttgaaggcagaaggcaacaaggccttttctgctaaggactatcctactgctatgtacgcgctaccccacctttaacactgtgacttcgtcaaagcagaaactgataaaaccagtgagaaattctctgaggcccttgctatcgaacccgaaaaccacatcctctactccaaccgctctgccgtctactccgcccagcacgaatatcaaaaagccctcgaagatgccgagaaggcgatcgagatcaagcccgattggtccaagggccatgcccgcaagggtgctgcgtaccgcggcctcggagatctgtgtacgttattctagttgtgcccgaattggtgggataattggcattgtgacaaggtgctaactgatggcagtggctgcgcatgatgcctatgacgaggccctgaagatcgagcccggcaacgcacaggccaagtccggtatggaggcgacccagcgcgccatcaatgcggaggctaccgcagatggtgtcagtggtgacccaacaggaggtctcggtggaatgttcaacgacccggctctgttccagaagttggccaacaaccccaagaccgccgccctgctgggagatgccgagttcatggctaagctgcagaagatccaacagaaccctaacagtgtcggagaggaaatccgcgacccgcgcttccttcaggttatgagtgtgcttctcggtattgatatgaacttcggtggcgagggagcggagcctcctattccttctgctaaacccagcacctcgcagtccaagaaggagcccaccccggagcctgagccagtagacgaggaggcaatcgccaagaagcaggccaaggaggctgctgatgctgagaagaagattggtaacgatttctacaagaagaagcagttcgatgaggccattgagcactataccaaggcttgggacttgttcaaggatatcacctacctgaacaacattggtgctgccaagttcgagaaggccgattaccaaggcgcaatcgagatctgccaaaaggctaccgaagagggccgcgacttgcgtgccgacttcacgctgatggccaaggcctacacccgaattggttctgcacacgagaagctgggcgacctcgcgcaggccatcgaattctacaacaagtcgctcatggagcaccgcacccctgataccctgaccaagctccgtaacgccgagaagaccaagatcacgaccgagaggaacgcttacattgaccctgccgaggccgagaaggctcgcgagcttggccagcagaagttccaggaaggcgactggcccggtgccgttgacgctttcaccgagatgaccaagcgtgctcccgacgacccccgcggttactctaaccgtgccgcagccctcatcaagctcatggcattccccggtgccgtgcaggactgcgacgaggccattaagcgcgatgccaaattcatccgcgcgtacatgcgtaagggcgctgcccttatcgccatgaaggaatacaaccgtgccctagacaccttcaccgaggccgccgaccacgacgacggcaagcacgctcgcgagatcgagcagcagcagcagaagtgcctggacgcccagttcagcgctcgcgctggtgagaccgaggagcagaccatggctcgtatccaaaatgaccccgacgtaagatctaatttcccctgcaccggattattcagcatgaagtttactcacattttctccagatcatggccgtcctccaggaccccgttatgcagagcattctccagcaggctaagagcgaccccgctgccctgcaggagcacatgaagaactcgcaggtacggatgaagatccagaagctgatggctgctggcgttatccgcatggggcggtaaatgctataagggtgtagagcattcgagggatttgaatacgaattgacacgatatatttttgccagcatatttcttagtttctaaaattccattctgcttatatgcatttaatcttctagagtagtagccagccagtagtgatgcttcctgtaattactgcaaatacaaggttgtatgaacgagtcctcgcgaaacatgtatcctctcagtcggcattgtacggagtactccgcacgatatatatcagccacaatatatagtagcagacaccagccccaacatacagacaccagccccaacatacagacaccagccccaacatacagacaccagccccgacattaatatacaattcttataaaacctcggcctcagctcgggcccgtggtcttcatctggcagttctcaagccgaaaaaatgaaaaaaagacaaaaaagacaaaaaagcgccacacaagtgggcgagtgggggttcccaattagagaaccacaagatctaaccgaactactttatctaccaatcataacatgaccattgaaggattcactctcttcgtttgtgttatatattgttgcacagacacagaatatacccgatacacacagctgggagtggaaatagcccctcaggaccaaatgcaagtctagatgtgatatgatagatcaattcggcgtgcagcacttggcttgtctatcgctgagtatttaggttgtataatcgtacaatatacgtactccatcgaggttcctcggtaaagaatacccattctccatatccaaggaacacctttggtggatacacagagtagacttggccgatctacctaatcgggattagggcacgatgcgaggtcgatagcgtgcgatgtgaccaagtttttcattacattctctggatgcatgccacgtgtaccttaagagctgagagtgttctaggtgaagtacgtagacaatgacgacatgccatatacatatactagttagtataagatgcccctatattgtactccgtacgggctgcatatcttgttgcctagacaggtaaggtagggctagatcgatagcctacaaagtacaaagtactagatccgcaaataaaaaaggggcattgaacccaggagatgcccggagtgccctagagccctaagaataactagaatccatggaaatcggagtttatcccctccattgaccctctactgaccctctacggagtattgctgaccctctattgaccctctgtggctgtgctgaaagctcggagtttagcctgtcattcccctgacctcctcaattgacggattttgattgtactagacaattgaaccggtacggatatagtcttgtagaataacctcatagactcatactccgtagactcagatgtgttgtatctgctctctatatgctaaagtgaggaatctgacccagctccgacgtacgtcactgatcttcgatcgacctcggtgttcgcgatctccgatctccccttttcgctctcttttctttctttttattgggctttcaattctcggaattaataatttacctaaagatatacataaggtatttaatagaaatatccattggcgtatcgtaaagaattccagccacagttccccttgacgcaagcggctgggcaacttgagctgtgcctttggtcccactcctctcctcttccaaggttctcttgtttttctctttctcactctctcgatcactctgtaccctggtatacaatagcataccaggccacctcttcgactacgacctcacgcaatcccggtacgttaattggtagacctgcgcaagtcagcagtcagcattcttcccctcaccccaggttccgctgaatccaatctgaccaccctctagaatatccccggctctctcaattccccccgaccagaacacagcaccaaccggcgatatggcgtccgccgacgcggctaagacggatatgaggatggagggtaccatcgaggccgcccaggaattgcaaaaggacccggaatcacaggttaacccggatgtcgttgagaaaatggcggtcgacgaagcccaaaaggctggctcggctgcataccaattcgaccccgatgccacgccagaagacaaggccaatgctgctaaagcggtatgtgtcgcaaaaagtccgagttgtgttcggcacaatcaccttgctaactggcatttcgtctagcgattgccgcctaattttcaccatccccatcaagccaccggtgttgctgtcctgacggataaggtgaggataactggttttcgcgatgcgctttcaatctacatcctaaccctacttagaccgacggcaaagcagactatgatcttcctccaccggaatccgcgaccgccattttggccgaggaagccacacgagaagatgcgggtgagaagcccgtcgatgaggatcttcggtgggcgcgcgacagaacgggttgggccccaaagttcgtcgatgagaagctcgcggcgattttggccgaggaaggcacattgctggatcacgagacatttttggagggaagaatccctgataagttctttggcgactggtatcataattgcgggattatcatcttcgcctgcctggcctcatggattgtcgctgttctaggcggtggtataggctgggttcttatggtcatggcagcatgcagcacctactaccgtacctccattcgacgagtgcgccgaaacttccgtgacgatatcagccgtgaaatgtccaagcagcgtctcgagactgacaccgagagcctcgagtggatcaacagcttcctcgtaaagttctggcctatctacgcccccgttttgtgcgacactattatcaacaccgtcgaccaggtcctcagtacttctactcctgccttcttagatagcttgcgcctcaaaaccttcattctcggtaccaagcctcctcgcctggagcacgtcaagacctaccccaagactgacccggataccgtcatcatggactggaaattcagcttcactccgaacgacattacggatctgacttcgcgccaaacaaaggacaagatcaaccccaaggtcgtgttggaggttcgtgtcggcaagggtgtcgtgagcaaaggcctcgacgtgattgtccaggacatggcttgcacgggcttgatgcgtgttaaagtcaagcttcagattccattcccccacatcgagcgtgtggacgtctgcttcctggacaagcccgaaatcgattacgtctgcaagcccctcggtggtgatcaccttggattcgatatcaacttcattcccggtctggagtcctttatcaaagaccagattcacgccaacttgcagcccatgatgtacgatccgaacgtgttcccgattgaaattgctaagatgcttgctggaaaccctgttgaccaggctatcggtgtggtcgccattactctgcacggtgctcaacagctcaagaacccggataagttctctggcactcctgatccatacgccgtggtgtctttgaacaaccgtactgagctcggccgcacgaagaccatccacgacaccgacagcccccgctggaatgagacgatttacgtgatcattacctccttctctgatgccttgtctattgctgcgtatgactggaacgagtaccgcaaagataaggaaatgggtgttgctagcttcgcattggacaaacttgagcaggagcctattcaggaggggatctatctggaagtgcaggccagtggccgccaccgtggtgctattcaagccgatatccgcttcttccccgtcctcgagggacgaaagaatgaggctggagaggatgaacctgcccccgaagtcaacaccggtatcgctcagttcaccgtggagcaggccaaggaccttgacggaagcaagagtctggttggaaagctgaacccttacggtgtcctgcttctcaacggaaaggagattcacattacgaaaaagctcaagcgtaccaacaaccccatcttccagaatgcttccaaggagttcctcgtcacagaccgaaagaatgctcgtttgggtcttatcctcaaggacgatcgcgatatcatgcaggatcccattatcggccgctaccagatcaagatgaacgacatgctgaagatgatggagcgtggccagcaatggttccatctccacggtgccaaggagggacgcgtcaagttgactctccattggaagcccgtcgagctggggggcattggcagcgctggctacattgaccccattggtgtcatgcgcttccacttcaagcgtgcgactaacctgcgcaacttggaagctatgggcaagtctgacccctacgttcgcgtgctgctttccggtgtgactcgcggccgcacagtcaccttccgcaacaacctcaaccccgaatgggacgagattgtctacgtgcctattcgcagctcacgcgagaaggtgactgtggaggtcatggacgaggagactatcaacaaggaccgaactcttggttggtgtgaactcaatgcatccgactttgttcgcgaggcggagagcggtggatatgaaatcgacgacgagaagcaggatatcaccagcggtctcaagatcagcggcggctctcccaagggagaaatcgtctacaatgtctcgttcttcccgtccgtgccagtcgtcaaccccgaggacgaagctgaggaggaagaagaatccactgagcttcctgctactcctggtccggactccaccgaattcccgaagaaggctttgcactcgaagtctgctagcgttgactcgaaggcctcgaaggcctcgaaggctgtgtctaacagcgctgcacccgtaactaacggaactaccaatggcgagcccgctactaacgggcgcaccagtctcgaaaccactacatcccgcccactcacaagtagccagtctgaaaccgcgtctgttcggtcggttaaatccattccccgcactttcgtctctgcggaggatctcccgaaatatggtatgttttgcttcgatattcacgggaatagtacaaagctaattgaccatagaatccggtttcattgtgttcaagttcctcgagggcaagctggccgttccccatgtccagttggaagtattgatggacgattacatgttcccttcatatgtctcatccaagatccatacaacgaccgcacagttcaccgacgtcggcgaggcattcgttcgcgaactcgaattctccaagattacgttgcggctcgtcaacaaggaggatcctaaggactctagcgaggagcacacagtcgccaagctgactggtgacacactgcccacactgatgcgcatgctgtacacgcccaccgagcttatcctccgctccaactccggcgaggtgagcaaggtcaccgtcagcgcccgatacattccgacggaaatgaagctcgacccaacggagagcatcaacaacatgggcaccctgcgcgttgacgtccacgatgccgctgaactacccgccgccgaccgcaacggattcagcgacccattctgcaagttccgcctggacgacgagaccgtgttcaagaccaaagtccagaagaagaccctgcatccagcctggaacgagtacttcgaaacccccatcaaatctcgcatcggcgcaaacttccacgtggatgtgtacgactgggactttggtgataaggccgacttccttggtgctacggcaatcgacctggaatccttggagcctttccaagcgaaggaagtgactctgcccctcgacggcaaatcaggcgcaatccgcctgagcctgctcttcaaacctacctacgtgatccgcgcccgccaaggctcctctaccttctccggcaccttcgccgtccccggaaagatcgtcggtgcgcccgttaaaggtgttggtttcgtcggtggcaacgtcgtccgcggcgcctcattcctaaagcacggcctgatgtcgcgcatccacaaggagaaaggcgaagacaccgcctccattatgaacagcatcgaggaacctgactccgtcaggggcgagcggttgaccccagccgcctccctcgccgaagtctcctcttcccccgccaccccgcagaaggaacacagccgcaaccgcagcaccgcctcgcagttcggcgatcgcctcagcgtcttcggtgggggcggctccggtgaaaagggcaccgccaacatcactgtcgtttccgctgctaacttccccaacgactccaatctccgcgtcatcatccgtctccagggttccaagggcgccaaggatgtccacaaaacgaaggctcacaagaacccctctggctcagtcacctacgacgactctttccgcgtccccaacaccaccgccgacgcccagtaccaggttcgtgtcgtcaaccatgccacgttcggctcggacgatgtcctcggcgaagcgccgttcttcgttgacgatcagggttccgtcgccggccaggataaggttattaccgttggtgacggtgtcgttaccattcgctccagctttgcgcttgcagatggtggcttgagacctactacgtcacactcgaccggaccccccgatgccagtgatggtggagggagtcctgattcgaaaaagacgccccgtcgcagcttcttgagtaagagggctgtgagcggtgtctaaatcactcctttactcttattatccgctttggaattcctttgcctgttcatggtgaagagtatatgaaaatatgaattgtttccgcatgttactaattgtgttttgtttgtgcttgttgtgatatccttttcttctcgtttttttcccactcctatcaatatgaattcaattgttgagatggccccggactccttgagacatctaccacgtagtataaaataggcgagtaaaaatagttgagaatcaatagtttgcgccacacaaaaagaccgagaacaagactgagtctgagacctgagactgagtctaagacctgagacatcagtctcaggttggtatcttaaaggggcttccgataaggatatactcgtatttcatgtggtatgcccattgcattctcatggccttatattaaactaagattggtctaaggccttctctgcatcccgagtataatttcccgaacttggtctgcacagcctggatgatctgcactttgatgcttcggcctcttggagtgtttagtgtacccgtaccgtagttagtatgttgtactatgttgtagtgtagtgtagatatagatggtagtggtagggatcgggaatactacataaagatgtctgatattcagcattttatttttagatccagacggagtacggagtatattaacctcatttatttagaagaggcgttgtggagtcgataatttaccgtcccacttgcagttgccactttgactggaagttggtttgcaacatacaatataggaaatactacaacatatgggatgcaattagtactagtctagatgaatttgaatctatatttgctgtactctgtagtaggaattgtgataatagggatccaaggtgaaaattctacctgcattctgtgctttgtactacagacttagcgatattgtatattgtcatataggtcaggtgaacatcatcccgactatgcatctatattctatcttggaatagcacataattaggcgaatcggccgaggtttgttcgaaacaattgaaactgaaacaaaaaaggagaagagcttgtatccggtggggcttgttcctatttgtagggactagctctcctctaaggtggggagggaaaaggggtctggattgttagtggacttgtgtactccgggcttaggggtatagtggatgatgaatggttctgatggcaatcctgtctaactgacacttcctacgcgtaggcttaatagcaacgtgcatgtcggtgctggttcccgagctccagcccgtgggcatgtcagtggctggcaactgacgacatcgggatgtaaggaggactgagcgagataagagaataggaatgggggatgacagtctctagagactctggaggaagagacacagtaggcacagtaggaagaacagagaatgcaggagacgatccgcagattatttatggatgttggcatataaagtggacgtaaatacccaaatcggtgcaaataacaaatacattctagaaatcacggggtctctctcccccactccatctcccttttcttccctctctctttcgtttataacctctggacatcccctctcctccccctcttcatttctgtccttaggaattgatctgtgagttgtcctccatccccgcccaatgacggcagcttgacatccaatggatcgacaaagtggcgaaccccctcctttctgaggcagcttgagttgagcttcttaaatggagccacgttgcccttttcttccttgaatctaccactgaccgtcgatttcctttcacatagccagtttcctccgagtccatacccatatctcataaaccataactcataatggcctctaaggctcttcccactcaccttcgagcccctgtcgaaagcgagggctttggtggaaagcaccatggcaagtcgcagtcgcacatggtaagttctcttcaggcggtgaacccttgaatctccgcatcctgaagcttcgttcttgcctttttggattgttcctgccgtttttgggttgttttgctgcgctttcctgcgctttcctggacgcgtcttgacgaggccacaacatcttcctcttttgctcgtttcctcttctcttcccctcttttcttccctttctcatccatcgctacactgttatcattgctcgattgcttgtattttgagaagccccattcaattgtctctatctatccctttccttatcatggctactttggcccccccatttggtccagagctgacgcgtgaaacctccaaccaggcatttgagaatgcctccactagtgtcgccgcctcgcaaatgcgcaatgccctgaacgccctcggcgacagcgtcaccgaccccaaggagaagaagcgtttcgaagccgagatggacaactttttcgccctgttccgccgtttccttaacgacaaggccaagggaacatccgtcaactgggataagatcgcccctcctcagccttcccaggtggttggctacgatgacctcggtgcggacgcctccgtagagttcctgaacaagctggctgttgtcaagctgaacggtggtcttggtacctccatgggttgcgttggtcccaagtccgtcattgaggtccgtgagggcatgtccttcctcgatctttccgtgcgccagatcgagcaccttaaccgtaccttcaacgttaacgtgcccttcgtcctcatgaactccttcaacaccgatcaggacacccagtccattatcaagaagtacgagggccacaacgtcgacatcatcaccttcaaccagtcgcgctacccccgcatcatcaaggactcgctcctgcccgcccccaagagcttcgactctcccctccaggattggtaccctcccggacacggtgacgttttcgagtccctgtacaactccggaactctcgacaagctgattgagcgtggtatcgagtacatcttcctgtcgaacgccgacaacctcggtgccgtggttgatctccgtatcctgcagcacatggttgactccaaagccgagtacatcatggagttgactgacaagaccaaggctgacgtcaagggcggtaccattattgattccgacggaaaggtccgtctactcgagattgctcaggtgcccaaggagcacgtcaacgagttcaaatccatcaagaagttcaagtacttcaacaccaacaacatctggctgaacgtccaggccatcaagcgtgtcgttgaggagaacgagttggagatggagatcatccctaacgagaaatccattcccgccgataagaagggtgaggccgatcaggctatctaccagctggagaccgccgtcggtgcggccatccgccacttccacaacgcccacggtgtcaacgtgccccgtcgccgcttcttgcccgtcaagacctgctccgatctgctggtcgtcaagtctgacctgtaccgtctcgagcacggccagttggtcatggaccccaaccgcttcggtggtgtccctgtcatcaagctcggttccgacttcaagaaggtctccgacttccagaagcgcattaccagcattcctcgtatcgtcgagctggaccacctcactattaccggaccggttaacctcggccgcaacgtcaccctcaagggaactgttatcattgtcgcctccgagggcagcaccattgacattccccctggatccgtgcttgagaactgcgttgtgcagggtagcctgagaatcctcgagcactagatgttgtcgtctgattcttgtgtcttgcctggtttgcaaacccgtcgcagtctttggtttttctcgttttaacggtgcatccgaggctatggattccacggagtattcaaaggaagtacttgtattacattacaataatccagcgtcttttttctttcttttctattgggttgtttttagtctagacctgactttgattcccaagtactgtgactgttgctccgggccattctcaatgcaccaatacaagcttgttcatctgcaaaagatctctacatgtatgtagataatgtagttgtaattgtatgcctacgcctcggtacttttatccgctatcaattcgatatatggccccaagtagaacacctacacctcatttagcctcgatatcacgaaacccagcttcgaatccgtgcaagacactgcaaacatgaaatcgccattgccttcaggcaaatgaacacctatcataataggcgggggaaagttccccatgatatactcccaacgtcattcgccgcagaataagccctactaaaccgtatcaaagcagagggggatctcaagtaaatcgtcctaccatcattcgaaacaggaatatactttgcaacaatatgcattcctgatcttgtacagtgtcaacattgtttatttgtatattgccaacagtacatatttgactgtatatctgacgcctttttatatattgtttttttttttttttgacatacgcttcttcacatattggacaaatatcctttatatatttgcatcttatatgctacattttacgctcgaaagaaacgcaaacgcaaaaggaaaagcacaccgatatccacctgctcatgtcggtatgagtgggcatcatcgccgtcttgtacccggtccctcgcctgaggaggaggaacatgaccacgacaactaccatgaaaatgatcttgaaaatggcagtccactcaccgaggaaggcaagggttctggtacgtggaagaagagagtttcgactgcgtgtctggcttgtaagaagtcgaagaggaaggtgagatatatgatacactactctacactacatctacacatatggatataacaaccaactaacactctaacgcagtgctccggcacatccccctgcgcaaactgccaaaccttcaaaagagtctgcatcttcgacgaatctctcgaccaacgccgacgcgtagccgcaaaacgcacagcagacgagctctcctaccaccgcgacctcctctccgacctcttcaagctcgtccgcgaagcaaacgaagctgacgccctccatctcctaacgataatccgccacaatgcccccgccgatgaaatccgcgcctacataaacgaaacactcgcctcgatcacgtcaaccactgatacatcaacatccacggcgcacaagcaggaaaccgtcgcgaagctggaggatatgcgccagcttctcaatgtcgagggtacgggtcccactttcagaaggaaggttatggatatccattacctgtgtgactcggcgccttgtgaagtgcctgcggcgccgtggacgagggttactgctgatgcggatctggtgtcgcatcttgtttcgttgtattttgcgtgggattggccgtttgcggctattttggacaaggaggtttttgttaggcatatggcgaagggggtattggggtcggagttttgtagcccgtttttggttaatgcggtgctcagtaatgcttgtgtgggtatttcctttttcactttcttttgctttgaggtttgctaatattcggttgctgatctgtttgtttagtacttctctgagttctccgaggcttatgttgttcctggcgatatctcttcaaaagggagtggttttcttgccgaggcagagaggttgagaggcgaagagaattcgcagcctagtttggcaggtttacaggggacgttgttgatgtatgagaggtttgtatagacatcttgtcctagtggctagggcttttctgacaaagatagatatgcaatgtcccgcgaagacgatctgggctatatcatgctgcaccaggctatccaaatgggcgaggcactgggtctggtcggcagcacaggacctagaatagcttcggcggagttatcccaagacatggatatctcatgcaagcgcacagcttggggtttgttcaacgtcgacacgtgagtgaatactgctagcatcccacccttcgaactcacactcacacctgcagcatggtccacacatccttcctgcgcccaagtctcatcgatcacgtcaacatggcccgtctggatatcaaccagcccgaagacaaagccctctggcagccatacccaacccatcgcgacccgcgcctgtcattcttcagtcagtacttcgacgaagcatgcaacctgtcaacgatcgcacgcgatatctcccgcaacatgttcgcagaccacaggagcaagactggcctcggccctatccaccgccagagccgcgaggatctgtacgaccgtatccgtcgttggcacgatcttctcccggaggactttgatgtgcggtataggccggctccgcatattatcttgttgaagtgagtagcatgtccacattaatccgtcttgtctaccgaaaaaaaaaagcaaaaatactcatcctacacagaatgcgctaccacgccctcatcataaatctcttcagctgcatttccgaagatgaagtcccgcccacacccttcgagcccaaaacaccggaaagcccgccgcgccatactcccgagagaaaatataacgcgcgggaagtaacgcagagcgcggcccgcggcatcgctgccctaacgcgtctccacagacgtgagttcggggttagccgcgcgcaccagtttgcgatgtatgcgatcaacctggcgctgtttacgctgctcgagcaagactcgtttgatgtgctggatgaggatttcctcattctttcgagtgcattctcggttgttgcgagtcgatccgcgctggggaggaatctgtttcatattttccgacagtcggtcagggcgaaggcgcagggctatcgtattcgggagagttctgtgcctgatgagttgaaggatttgtttgacgaggcctcgaaggaaagggggtgtgatcgatttgatgagtatgctgatggacttgagaagttaaatcagaaggaaaagtatcatgggattggagatgggaatggtaaagggttgcaggattatcctggacttggactttccgatatgttggatcgatatgagagtctgagtcttgggaaggatgatgttctggttgagaggtatcgacctgttggatgttgatgggagaccgcacgatgcactatcctcggcatcctcgtcatctcggtcgtatgtctccaggcacatttgccttcacagagtggcgacacggttgtatgaatttgctccatagatatagatcgtccagataagttgataagttcagggggatgtataagctgacaccaaggaggaacaccatagaatgcgacagttaccgacacgtcacagctaattatggagtctcagatccccaagagttcataggtaggagttggttgacttggaggttggctgaggttgggatgttgtctgacgtcaaatcggcagttcatccacccgccaagtgaatgtcatctccacgctcgtccactttagtccaacttcgccccagttgagatatttgacagttaaaacattggaaacaaatcatcaatccttgttttcctgtttgtgctggaatgtttttgccatggctttgttccgcctttcttaccttgtaccctccctcttcaaccctcggtaacatatattcgtgtcaataatctcgataaatttgataaatttgatatggataatcatgacctaactctcgaggactacgtctcgatgtcatccgtacctggttatatacttccacaaccctatcctacgcctatccctttctcgccaatacaatacgccttctcacagcatatgtcaaccccgtcagcatccggaagtactgctccaaaggtagccattcctagactgacgggttctgatacctttatacacgggcgccgacgggcagcgcgggcctgtcagccctgtcgccagcgcaagatcaaatgtgatggtatccgcccgtcgtgcggacaatgtgcatatcacaattacggctgcaactacgaggaagtcaaacgagtgcgggatcagaaacaactaggctccttggccaagcgagtggatacatatgaagctcttctgagagacctcgaagccgaggtggacccccccacagctcgaaaaatcaaaaaagcattgaaggtatgtccagtcaatatcagatgaagttgcgggtctcacccaagactcggatcttatgatttgagtcccgagttcacgactctgaccgtttgccatttggcaaattaagtccaaaggtgtgaaaacccctagaaagagtttcgactccgatgattcctctacctctatggactcactcgatgctatcgaccaggttgacgaagacctcgatcggaacgcggacacccgggctgcgggcttctttgggaagaattcagaggtcaattggattcgcaagctggagagcggcgtggatatgaagagcgcacaggaacatgtggcgaatcattctcaaacgcaaagtgatcgtgatccagcctttatgcagcagcaacagtcattggaaaggcagattcccacttctacgatggattatcatctcgacaatttggacattccgatgattgaaccatgtgacccattagctttgcccccgtcggcattggcagaccgatacttcgatgcctatctgaccaacgttcatccgacattcagcgcagttcggaagatgaccttcatctcccagtatcagaagtttttcaacaatgaatcgacaccacaccggaaatggctggccattctcaacatgatatttgctattggttgtcgctactctcgactcataaatgacccccaaagcactagtgaggaggacctgatatacctgacccgggcacgccatctcggtctgcagggcagtgtgctattcgagcccactgacctccagcagatccaactcgaactcctcatagcaatttacatgctttgtctgggacaggtcaaccggtaggttcaatcctttcaccctccattccttctgcatcatactaattccctcatctcccccagagcatccaaattctccaacatggccctccactcagctatatctctcggcatcaacctctgcataacagacgaccgcaccaaagaagccgccaaagaaactcgcggccgactctggtggtccatatactccctcgagcaccttcttgcatcaatgaacggccgggcctcctgtgtcggcgaaggcctctgctccgtccctgcacctcttccgtacgaagaagaaatattcgatcaatccgacgctaaacgcctcctccaagatccggccctccgcgaagcccaactccgctccaccattttcgaaagtcccagccaacaccactcgccctcattggtgacctcctgtctaccctgtccatccctcttcttcaacttccttgtcgacctaaccctcatcacccacgccctcatcaacaaagtctacagtatcaggggtctccgcaaaggcccgagccagttagaataccacgtccaaaaatccagcctacaaatggaccgctggctctcaaaactttcccccttctacgaattcaccattccaagctccgatccctggcacctaaagcacccccaactagacgacctctccgcgcccttcgtgcgcgaacgcgtctgtctagcaatgaactattactccgcccgaatcaccctttgcagaccatgtctaagccatatccaccaatctccccgccacgtctcaccaacaggcgatcacgctgcgcgcgaaaaagcgcggtccgaaagggccacacactgtctgcaagcttcctgcgcactgatctccatcttcccagaagatccgaacattgcatggctggcccgcaccacgccctggtggagcattctgcatttcctcatgcaggcgactacggctatattgctgggtttgtcatgctgttctgactcaaatacgcccaccagcccggaccatgcggatccgctcctgacacctgttacgccgtctatatcccagaccggggcttactcgccgctgctggagaaggatttgactacggctgttgcggcgactaagaaggccctcgcttggcttcatatgactgcttctgtggatccgtcggcacgacgggcatttctgctttgtgatgggattgttagaaagattgcacctggcttggggattgatttgacggagtggccggatgggagttcttttgagaggttgatggaggagaaggagataagtggacatgggaattggaatgtagatagtagcggaagcaatgagcaccacagtgggagtgggatggaggcgtatgatgagttggttgatttcgacggaggtgttttttagtttagtttgagcgtgatgtcacttttatatctggatatacgatgagaatatgattgatgaacaaatgtctacacctaatatatccatatgccactttaagccgacgctagcaggcagtcattgagaggcgcatgttcaaagttttagcatcctggacggatgatgctagaatcgctcttaatatcaagtcacagtcacggagcgactatctggctagtaaggattgggaggcaaagaagcaaccggtaacttggtctgagaataaacggacctaagccaagtggattacgagcagcaggaccccaagcttgaacttgaggcacgggaatgacagtgctagtacggatgagattcagcgcagtcacttccatagcgaccttctcgtcggcatagtcattaagtgccatccccacacaaaggaaacgaaccatccaggtagtattatcgctaaagaccatcttcataccggcattgaatgcgccatggtgaaaggtaccgtcaagctggcagggaagcttatcaggatggaaagttgatacccattgacagagatgactcattctgtaggtttcattcaccctgtcaacccaaatctggccttgcacctcgtggacgatatcaataagcgcgtttgtatccatgacatcaagcaagtttgagggttgagacgagtacgagcaccggacaagtcaccgctaatttagcatgaaggaaatcatattaatccgtgttaatccgctttttgacattccatctgctcagagggtcttgtcgaatgtcgagatctctcatttacgctagttagttagttagttaacgtaatcggtaagcgagtggccactgtaagcgagtggccaccccacccaagaggatatgatcttatgccctgtctttccacacccactacaccttggtgcagcccgtggtcgtggttctaaccctgattgagtgcttccgcccggggggtgtaggggtatttctaatgcttccaccagcctagcaatgatttcagaagcttcttgaactgagaggccttcttcggcgggtatctgccgtctagatcgggcccgcttttgcttcttattctcattttcatcccgtaaatccttgttttctttcgctagtaaaatagcgctatgcattgcaagctcgcagcctttgataagttggtttaatgcacgtttagaagggcttattaggcttcgagattgggttcgaagtaaagctttaatagacaaagcctgtcgacgtagatctttgctattaaaaggggtttttggggtgaaattccggcttaaatcgctaccccggcttagggggggggttagcgttcgaagataaatattgagttttgaaagtacccgatcgggtaaaaaaggtattaaaccagctgctgagaagctatttttaatcgtctccgatttaaaagcttcaattcgtacagaggggtatacttcgaggaattcaagtttattaatatagttgatcccagtctgcattttcatctcaactaaccggctgtacgaccgttttaccaccgcaaaacaactgatatcgagaggttataaaaggtgagaggaatacagtggtatacaaattggtataatatcgttttccttataaatttaatcgaattaaggggttaaatggcttctgtagccattgagtactaaaagtcgataccttcctactatacgcaataaagttaatagtataaagagtttctaaagccagcgaagtccaatttcatctaatatccacctatttggactaacttcaaagcgccagttactaggaaggccttcgaaccataatttaaggaagaccttacctttaaaaataatatatagagggaggacctatcctaccgcgtttatacatttaattgcagttacctactcgcgatttctaggttgtaaaagtaatctccaactgtagtatttacttcttattataacctttgccgttatagttaatcctattataaatccagtctcatcgaagttataaatatcatctaggttaatcccaaattaaataatagttttttaaataagattaaactattctccaatgatttttaggtctttacacttcgcgcgcttataattataacatcttaagaaccgagaggaaagaagagggcgttgttttatgaaattgtaaacctatttttcgctaaccaaaatgactagggtagttccgcgctttttaagaagaagattcgccatttcttataccatagagggccggggagctgatccacgagaatccatagagagaatccatttttgaagagattcctcttcaattgtagtcaatttagtcgagttggcgcgagaagtcgcgcggcattgtattccatcgaggcggcgccgaagggttgaacgcgggacgttaaaggtacgggcggcaatagaaatattggtaaattcttgtttcttaaaagcctggatagctagtaagatcctaccctcctgctctattgaatctttagaggattgagagcgaattggtggcatggtgggtggttgaactaagtaagtgctaattcatggacgcgtttttgggtagggtggccacccgcttaccgtggccactcgctttccgannnnnnnnnnnnnnnnnnnnnnnnnnnnnnnnnnnnnnnnnnnnnnnnnnnnnnnnnnnnnnnnnnnnnnnnnnnnnnnnnnnnnnnnnnnnnnnnnnnnnnnnnnnnnnnnnnnnnnnnnnnnnnnnnnnnnnnnnnnnnnnnnnnnnnnnnnnnnnnnnnnnnnnnnnnnnnnnnnnnnnnnnnnnnnnnnnnnnnnnnnnnnnnnnnnnnnnnnnnnnnnnnnnnnnnnnnnnnnnnnnnnnnnnnnnnnnnnnnnnnnnnnnnnnnnnnnnnnnnnnnnnnnnnnnnnnnnnnnnnnnnnnnnnnnnnnnnnnnnnnnnnnnnnnnnnnnnnnnnnnnnnnnacctattttaataccgtaaaacagccgatattaagtagttataaaaggtaagaggaatacagtagtatataaattagtataatatcgttttccttataaatttaatcgaattgaggggttaaatggcttctatagctatcgagtactaaaagtcgatacctttctactatatataataaagttgatagtataaagagtttctaaagctagcgaagtccaatttcatctgatatctatctatttagactaactttaaagtgctagttactaggaaggccttcgaaccataatttaaggaagaccttacctttaaaaataatacacggagggaggacccatcccgccgcgtttatacattcaattgcagttacccactcgcgatttctaggttataaaagtgatctccgaccgtagtattcacttcttattataacctttaccgttacaattaatcccattgcaaatccggtcttatcgaagttataaatatcgtctgggtcaatcccaaattgaataatagttttttgaacaagattaaaccattctccaatgatttttgggtcttcacacttcgcgcgctcataattataacgtcttgagaaccgagaggaaagaagagggcgtcgttttataaaattgtaaacccatttttcgccaaccaaaatgactagggtagttccgcgcttttcaagaagaagattcgccatttcttataccatagagggccggggagctgatccacgagaatccatagagagaatccatttttgaagagattcctcttcaattgtagtcaatttagtcgagttggcgcgagaagtcgcgcggcattgtattccatcgaggcggcgccgaagggttgaacgcgggacgttaaaggtacgggcggcaatagaaatattggtaaattcttgtttcttaaaagcctggatagctagtaagatcctaccctcctgctctattgaatctttagaggattgagagcgaattggtggcatggtgggtggttgaactaagtaagtgctaattcatggacgcgtttttgggtagggtggccacccgcttaccgtggccactcgctttccgaatccatatggtggagaagaacgccgatttcacggagggtatcatagtcataagagacctggcttttcgattctagccattccaagatggagtcggccttttcttcgaacatttttctcagggcatcatggtcctgcagcataggcggattgacaggttgagaagacatgatagacggcgtggaaacgcgacgagattggttgacagtgttatgaaaatgatgaagagacgaagaaacgtggagatgtggagatagagaggtggaaagctggaaagctggagagctggaataagtctaggaactataatgcctctgggcggaaatgggttagtgtgtcaccgtgacccactctcacgtggaccacctaggcagcctgtttccagcttactcagcgtaccgtccacccgtggacccagctcaagggaccgggcttacagctgatcgaatgttagaatgggaccgctaatttagcgtgaaggaaaatatattaatccgtgttaatccgcgtttcgaccatctatctgctcagaggggtcttagcgaatgtcgagatctctctttacactaggatgtcttcatagcttataatagacgttcataaagaccccgtgatcattatttacagtattatctttaccactaaatcctatcttcttctgtactagtgtattataacccctgtcgatttttttaggcggattttcatactgtcctatcttatactctacatatatccagtataaagaaacctttctttaaccctccggcttttgcactttgcccaggacagctacctcaaccattcccagcacgttataaaggagcaccagagcggccaagaacactttcacctgaccattacactcatctttagagggagattaatcctaacactatacccccgctagggatcctcgctgatataaatataataataccacctaatatcttagcccaataggcggataatcaatcagaagattctaccgaagatctgaatctcctagtacaagatactacaaataccctcgaggctccctagacccccttggtcacagctgagccactatggttactatataggagcctcgagtgtatttgtagtatgtcgtactaggagatcaagatcttcggtagatacagaattatccggaagcggtggacagcaggcactaaggcggtgtacagaccatccattgagagaatcagtacggagtagcatgaacaaaagaaaagaaatcaacaatgtctcttctatacagtctgtgaagcgagcggagtactccctgaacaagggggctattcccactattcatggctattattgtatgcacctaaccgtgtagaggttaaacaaggctagttgtgcacacttgacaaaatgacagctgagtccgagcaccgggggaatacaacttgagtgagtgattgagctgcatcatacggagtacagaatacatacacacttgtctacggggaaagacacctgctaattggctataccctatataagatttacaggggctggggtcggtggctacctgactgcccaaggccaggcctgccccaccgttccttgctacatagatattattcaatgcctgcatgaccttcgccattcttgaagtgtttgccaatttttaggtaattacaaggcgtgaactagatctccgttaagcgattcggcaaacttggcccaaattgccatgtgatatagagagtactagatatctcgtatacgggatcttcggtcacatcatccacagctctttgctttttcctatagctggtgttgatctgtctctgaactcagctcgccactgctcatgggtatggtagtgcatagtgatcacccttcacttagttttacgttatcataatttgtgaaatctatagatggccagttttctagaagtcaatgaccaaccccagtggtagctatgcactgtgacacatggggaaccccagctgcatgatcttcttgcgcagatacacacagtgccaaaactttcgtgacctgcttagtcgataaaagtgagacacgcaagaatgaacgaagaaatagagctgacgagtatagcccgagttatggggagctgaagaaaagatgtgcagctgaatgagccaataaacatgcacagtgacaaaacgaagacatcgggattcgacctacttagagttgcacagcagaaaaggaaaggaaagtgtgcatgtattgtcgatcatattatatacggagaactccgtgtagaatacagctgcatctaatttaaaccatatgcatgatgcacgaaaaagaaatccacatgaaggcaagagaagctgaacccttgtaatactccccctatttgaactccgtatatttacttgaataggacctatttatttggccttggaacgccttctacagatatccttcttctattcatcatccttcatcatggtgccctcaatcactaggctcgaacatgtgtcttctatcatacctatcaacaccttgaagctacccaagaaagctccctctcacacacaagactccgtcgatcttcctcttactctttgcgaatcgcatatactcgaggctgccaactcccagtacttggaatacctggatccagaactagctcggggtcttgacattgagtcaattctcgttgtttgctggttacttgtggtacatggtttctctcctgtgagaaccatgtacctagagttccatcctggctcaaatctgtgctatatagatggcaaatgtcaagggactgattcgcacgctcttggattttccgtggagcgtccattgaaggacctcgttcgagacttctgtcttatcaaggcaggcatcaactcgggcgaccctgatgaagggtgggcttccgatgataagaatcaccttctcacctcggctgtccgctatggtggtgaccgtccaaatttggaaaaggcacctttgtctgccaattcaaaggtaccgtttccatatcctcactcaatccccccgtaccctagcaaagctaatctcatctcggtctagatccccaatccaaagctgatgctcaacgtgacaaatgacaatggcaagctgcacgcaagtcttgccttctcgtcgcccgagatgtcgaaagaattcgcaacaagccttcttcactccttgaacaaggtcgtcgcatccatataccattcacccgaaacttctttgggcgaccttgatctatgctccgaccttgacctcattctcctgcaaaagtttacgagggaggtttcggactctcatgagatcttgttacatgacatggcattggagcatgcgcgactgaccccggatgcgcccgcaatctgttcctgggatggaaacttcacctatagagagttggataacctcacatctcgtcttgctctttacttgaccgggcttggcgttggccctgaaattttcgtgcttagttgtttcgaaaagtcatctttggcgattatcgctcgcctggctatattgaaggccggcggggcatacatatccatcgacgccagcgaccctcccatattcctagactcggttatcagtcgcgttaatgctaaaatcatgctcacatcctcggagtatgcatcaaaatatgcctcacttgtctcaaacgtcatctcgattacagaagacatgctgaaagagcttcccacaggacctctggcttccacagtccaacctcataatgcctgtctggttttgttcacctctggaagcacaggacagcctaagggcattatccaagaacatcggtcttacgccacagcaatccgcgactacaacaaggtcctcgggctaggccaacacagccgtgtatttcagttcgatgactatgcattcgacatcagtaacaacgattacctcacagctttggctgccggtggctgttgttgtgtccccacacctgaaaaaagcatagctgctctgattgaaaatatcaatatcaccaacaccaatatgagcttcctgactccaacaattgccgtccaactcagccccaaagacgtcccgtcgctggagctgctttgtatcggcggcgagcccatgtcaaatgatctcctcatgaaatggggacctcatgtgaagctggtaaatcagtacgggatgggcgaggcggccaccttctgcgcgtacaacgacaaccccaaggcaggccataatgccgtcgtcggaaaatccggtagcggcgctatttggattgccaatccctcctcgtctgagcggccagttcctatcggcgctgttggcgagatcttgattgaaggcccacatctcgcccgtgggtacttggatgacctctgccagaaacccgacgtgggattccttagcacagtgcctcggtggattgccgatctccacccgtcgcgagcgccgacctcgcgcatctatcggtctggtgatctgggtcgatatcgccacgatggtactgtggagcacatgggcagaaaggacacacttcttaagctcaacggtggccgtgttgagtcaaccgaagtcgaatacgtccttcggaagaccctttcgcctggcgattttaccgtcgtcgatatgctcggtgagattgacggtggcgatagccccatcctcgtcgcttttatctacttgctggataacccagcaaaccttcttccgggaatctcagatcaggaaatgtcgttccttcccattacaaatcgtgtccgagtgaacggcttggtggaggcgatgcagaatgaagtctatagcacgctgccaaaacacatgatgcccagcttgtttctccttgtcgatcgaatcccacgtacaaggtccaacaagcttgatcgcagaaagttgcatcaaatcgcccaaaagtggtatatggggaacccatgtctgtaaagtgataagcactgtttttcatccttctgatttattttctcttctttttcgatctggttcatgtgcaagctggggcagatgttgactcgcggcggtttggtgtctactcattatttaatcacatccatagcggcgggtttcctaaaataaaaccgtggtcttattgagcgtcaggtcctcagactctagatatacgtgagtttctctataagggcctgtctacaccatccaagatttgagaacgcgctctcatacaaccttggaagcggtggcagtggagatcatagtacatagagttgacacaggtacatacagtaggtaatcagtgtatgcatgcgtagtgataaactaagaactgctcctataagaaaatacagttcatgttaaggaaccacgtgtaagttaaacagggctagtggtgcacatttgacaaaatgagattagaaccgagtatgtactaaattgagaacattagatatatgagaaaaggaaaaaaagaaaaagaaaaccatgggctaagtgaacaatagagggaaacaggaaatgcctgaaatgccaatgacacaaaagcgcgcaacaccataagaggcccacgaaacgacctgatatacgagacttcgtggacgtaaaaagatcgataaaacacacatgacagaaccgaagaatgatataaacaccgatgttgtttagaatgaaattcaaatcagaatatactaggtagaggagaaactgatcttgcattaaatggatgaaaaccatatcctgaaccatttcagcactaggttggttgcggttgcatctggacctggaaggtatgctgatgttcatgctgtggtgcgggcgggggaggggcttggctccgctgtggaattggtggtctgcgtgattgtcctggtatcccgtggacaggggactcagacatcgggtgttgcatatgttgttgcatcggagattgaagatagggctgatgaggaagaggccgtggagggtggacaggagaatgatgatgcatttgcatgtgtggcatagagagcggctggccaggctgctggggcagggattggctgtgcggcaagtgagaaccgggttgtgcagacatgtgttggttctgttgctggtgcatgtgctggacttgcggctgcccaatatgctgatttgcctgcgcctgtgaaggctgattctgttggaacatatggaggttctgctgttgcggcagagactggccttgaagcatctgcgttggtgtcgggcagtgccgcttgcgcgactcttcatcgattgaagaggttgcacggttcagtatcgtcgttgtatctgcaccctcgcgcaattgagagttgacctctgcttgcgtctgatctccactagccgcggcagcggctggcgctgccggcctcnnnnnnnnnnnnnnnnnnnnnnnnnnnnnnnnnnnnnnnnnnnnnnnnnnnnnnnnnnnnnnnnnnnnnnnnnnnnnnnnnnnnnnnnnnnnnnnnnnnnnnnnnnnnnnnnnnnnnnnnnnnnnnnnnnnnnnnnnnnnnnnnnnnnnnnnnnnnnnnnnnnnnnnnnnnnnnnnnnnnnnnnnnnnnnnnnnnnnnnnnnnnnnnnnnnnnnnnnnnnnnnnnnnnnnnnnnnnnnnnnnnnnnnnnnnnnnnnnnnnnnnnnnnnnnnnnnnnnnnnnnnnnnnnnnnnnnnnnnnnnnnnnnnnnnnnnnnnnnnnnnnnnnnnnnnnnnnnnnnnnnnnnnnnnnnnnnnnnnnnnnnnnnnnnnnnnnnnnnnnnnnnnnnnnnnnnnnnnnnnnnnnnnnnnnnnnnnnnnnnnnnnnnnnnnnnnnnnnnnnnnnnnnnnnnncgctcttccgatctaggccgcccacgtggtcggcccgtgccaggtgcctttggtttggctgaagctggcttccttggtttagggggtggtaaaggttgacccgttgcagctgcccatgcaatttgatcagccttacgaggacgtccacgttttcgcttcagcggagtgccgtccggtcccagaataggcgttcccttgattgtgctattcggtgcggtggagcctggagcggtcggtgtcatattcgcagtgaatgaagcctgtcctggctgaggaactcccggcatagactcgccgttttgggcagcctgtgcggcctgcgcagcaagcctagccgcaacttcctccttcctaggccgtccccgacgacgcttcaaaggcggagtggcaatctggtcacctccaactgtggccacagcgggcatctgcccttgtccgttggcctgtgtggggacagcgctaggaacagtcatggaggcatttagctgaggttggacatgaggctgggattgggtctgaacagcttgaggttgaggcggaggagccttcttggtcttggctttcttcttcggtgcaggactcgactcgtcaggctgtatgaccggactttcagtgactgcagagataaccggtgcagctggctgcgatgaagacacggcagctgagtgtggtccctggtaatgctggaactgagcctggtgcggagatggttgaaattgggtctgctgcggctgagaaaattgcgtctggtgtggggcgtactgatgttgcgattgaacttggtggtgctgatattgagatgggtggaatggaggctgagtgtgttgggaaaacggtgactgttgttggtacgggttgtgcgcctgactttggtgctgcaatttttgcaatctctgctggtccagttgctgcttctgctggtgctcaagccgctgctgttccagccgttgctgatgctgtttctgttgctcgagcctctgttgctctaggcgttgttgctgttggtgctgctccaatatcttttgctcgtctagcttttgctgctccaattccttctgttgctcaagccgctgctgctgttccaagcgctgctgctggatttgcttttgctgctccatcctttgctgttccattctttgctgctgctctagtcgttgctgctggaactgctgctgttgaatctgctgttgcagctgttggtgtgtttgctgaggtgactgcggctgtgactgcggctgtgcctgtcgctgttgatttaaagcaaacatagacgggctagccatagacggactagcagaggtatggttatccctctgttgcatgcctgcgtgaggtagtctgttcatcgcctgctgtggcgaaggaacactcatggggtgtccatgagtgaggccggttgtccctggctgcggccgaaggtgggccattggattaaacccacgctgcaggttctgcagcgccatagggtctgggttgcgagacataagatccggggagctctgcgccgtaaattgccccgggaattggccataactgctgctagtggggtagccacccaatgaccccgatgtcggggtcatcttacgcatatctggagattgcgacgcagcgaagttctgctgaggttggccccgaaaaattggcttgttgcccgggaagggactgccatgctgtggcagcggcggccccgcacctagtaagggcgattgggcatgctggcgttgaggctgtggacctaacggatgttggggctgaacaccttgatgttgttgctgctgagactgctgcggctgttgagggtgaaattggtgaccaccgtagttcatcatcttgagtcaattttagagatgcgctggcacttggccgtaagcggcagagaatggagtgatcctttccaaccgcgaagcatgcaagggcgagaacggtcaaaataatcgcgtactagcttgaaaaggaaatgtagaatatagaaaggcagttttaaatcaagactcgtcaccgatatgcgccagcgctgctgataattctatacggggaatcaccacctgagtcgcgccgaggccgcgtgtttgtttgttccctggcggctgaggccacaaggcaacaaggcaacaaggcaataaagcgaccgcgcaccggttcccaattgggtttagcggctacggagaccgagacaagtcggtcagcgcactttgagaaaatgagtcgacggtcgctcaaagggatccagggggggagaccagctggggggatccagagagacagcgaaggtgatccaaatctatttgctagaggccttaacggatgtcagggcctagcagaagtagattggagatgaagtggatgacgctgggctggaatcctcgatggcgagggaaaaaaacattaaaaaataaaataaaaaataaaaaaaagaaattgggaaaaaacggaattttcagattctcctctccacatcacgtgaccccgaggctgccatagtgtggccgtgttcaactacactctctacccaaggtgagttggatagtctattcatcatctcgagctgtggaggtgtgaggtttgggatttcgaaacacctgaaccttcgtttgtctccttcactcctcaatcctcactcacacactcggccatctgcttatcttccgcaatccttgcaaagtatagaaccacaccactcacaagtactacacaaagtacgtgctacctgaaaagtatggagacatcatgctgtttcctaacatccttgtcctctgctacccggagatctgccaaatagggcgaaaagaaccttgaaacaaacccctttcaatgtgccaatactgacgaagatccacaatgcaaaccacaaatcaggagcagatctgcacaaaattagccgagcactataatatatgttgtatgaatatatctttgatcttgtctttctgagaatattcaagaaaccgatagacggtcttttctatctttcctattctgacgaaagtagcctctggaggtgtaaacatgtgtaaaaagaaaaaccgataaacggcgcctcttttgtaaatacacatgaaattatggaagcgacagaaaaaaaaggctctaaaatgtgcattgaaaaaaactaggacatgtatatatgatcaagtttcaaggtacagaagtaatccctggacagattacaaccctatctgctctgccgcaacatagtcttcccagaccttcttaatgtcattttgataaatgaaatccttgtctccatagagaaaattgtcgattttggctttcagaatgacatcaaaatctttctcttctgcttggagttgttctgctttgtcacgtatttcgtctagatgctgatacctgcaaatggtcggaaaagcggcgtcagacaagccattttgcgcacgctttcaagtttgaacttacatcttggcatagtatggagaccggatctgttcaaagatctctagagcgtctcgtgtagggcgagaagtagcctgcgtaaactcaagcgcccgtgcgaggatccaaccatcctccatggcaaacgtcgccccagatccgaacgcccctggaaggctgttagcacttgacattataaccttaaatgataacacatgaacttacctgaaagcgggtgactggcatctccaatcagggcgactttatcccagtcggtgatcttgtttagacgaggcccagcgaatgttgcaaactccctccattctccttcaggaaccgcgcttactgcgtctcttattctttggtcaaaagcctgtttatatgttagcagtgagtcttttttttcagcaaagtttctcgcacctcaacacgggatcccactttctcgttggttgcagggataccccagaagaccgtcttccctgagacctcaggctcacgataggatcgaacagtgatttcaaaaagcggatctttggactctgcctcatcgtccacatcagagaggtatacatggccagcttcaccccaccaccatgaggttgtagtcgtgatgtccgggatgtgggccagacgagacttcggaattagaacacggaacgcactgttacctgtaaagtgcagtcgatgatcaggcaatagggccctacggacaacctatctcatgaaggtccgtcagtcacacatgccagttttatcacaagaggctcgacgaacagagtgtattccgtccgccccaacgacaatgtccgcaatcgcttccgtttcatcctgaaataccaaccgaaccccccgacccgaaaggttctccaaagatacaacctttttgccaaattggatcaagccctcgggtactctcgataagagagctgactgaagtcgggttctgcgagcacggattgatccgcgggaatcagcagcggaattttctggatgctcagtgatgttcaaaatcttccctgtgtaggcatttcttccaagaattgaaagttaacatatgcatttgttgttactgtgtccaggaaagcatcgcttacctttggtgtgtgttggatttggagcctcccttgacgccatcactagctccaagtaaatctagaactctccatgcatttgtgctcaggctgaggcctgcaccggcttctcggggctccgtatttttctcatacagagtcacctttagaaacggcagttctgagagagcaatcgccgtacctaatccaccgggcccgccaccaatgatggcaaccgatgtcaatgcttgtccgaccatatttgcgaaataattgtatgtttagatgtggtggtttccgaatgttgggaattttgtcttgcttatatatccaaagtattgcatctcgcggtcggcgctggccggtagataactccatcgcacgccatactaagtctcgaatgtgccatacggcactagtatgatactgcccaccaatcccacgacaacggattaagaatcagaccccgcgcgtggattgtcatagaatatttcgatttggcacgtgctggcttgttggtgagtcgatcagaccatctccttagttgcaagtcaagggaatagcgttggcccgttgagagaagaggataccacctcaaagccaattgaccccttatcatggatcactgatgtctagctattagtcttagtgagaattgtcaccccggtctctagcctgctatggagagatcaaggttgaggaatacgacctcggaccttctcccatacaaggtacatgatataaccccggggataaggtcgttcgagtcttgcttatcaaccgtatatcgaaggagtctagtagtagcagtgtacctattctctataaacatcttcaagaccaatgatgatatgcatgttctactctatccctaatatagatctcagatctcaagcttgccacatagcaaatctccggttccagggaggctgccgacatccccaaagtgaaggaatgaggcgactttaactttgtatcgtttttcatggtcataaactccccgatttgggaagagacctttcacatcataccgaatgatgatctcgaatgtacaaaaagcagaaatgccaagtcgtgagatactcctcgatgggatagtacttctggatagtacccagaaaagtatcatatgtcacagatgtctagggcttgatatatcaatcggacgttctgattgttgttatgatcttttggcctggaggtactggaggtcaggtgcagcttgagtacccgcaacgcgttgtaatcacgtgaaccttggcactcgttcccgcccaaacgtaaacaaccgactcaacctaatataccccgattcacaccttatggcagctacataacaccgctagggggggggggggggggggggggnnnnnnnnnnnnnnnnnnnnnnnnnnnnnnnnnnnnnnnnnnnnnnnnnnnnnnnnnnnnnnnnnnnnnnnnnnnnnnnnnnnnnnnnnnnnnnnnnnnnnnnnnnnnnnnnnnnnnnnnnnnnnnnnnnnnnnnnnnnnnnnnncggggggggggggggggggtgggtgggagggtttatgagcccccattaactccttcgcgacatggagaaaagctttcctcaacaatcacccaggtcatcgtcgagtcctcgacatcatcgagccggccagcgatcaagcacttgaacagcggttccatcttagctattatgctagatttatgcgaatgctggatactgatgaaattcttcaatgttatgtggaagacaaggtccagtggattggctccaccagctcactcacctcatttcttgcttactcaaatcatcgaaaagatagttacgattatcatccaagcctttcccgtctatctgcccgaatgcctgccgagccctcttcataagaacttcttcgcagagttggtttgggaaatatcaagtcaattaagggtgcttcaaaggcgtgacgagctcgcagaatacgtcgaagaagcgaaagttccctctgtttcctcggcgattggtcctcccggttgaattgcatcaaatacatgccgaataatttcaactcaaagtctataagtacaccaattcggactgcgatactgttgacaatctccgcaagcgtggtatccgcattaatgctgtcggtcttaagtcccactttgttgtcggccagacgccatcgcttgccgatcagctcgctactaagaaggcttacatcaaggctgatttggatgttattatcacaggacttgatattcgcttcgcggaggagccatactatactgctaacatgcaggaacagcaggccgcggactactacctctttgttcaacgctgtcttcaggctggacatagctgcctgtcatgataccctcaaggctgaacaggcgtattgccccgttgttgaggtgtgcaaggtaataagtgcactttttgttggcctattggtactgggtcatatttgagaggagaccttgaactttgtaaagagaacctaatttgacttttacaaatacttttaaaaagttcgcgtcaccgggcggataatttggatatctcataactcttaagcaccatttatcctagtctagagttgatcttgtgcctgtgcttttgcaatcgctcctggggcagcaggcatgagtgcacctagaggtggctggttcttccctttgaactcatcgcacatttgttcgaatgtaacccactccactccctcatgactattgatatattcaatgagcctgcatatattgcattagtctcacgttggccaacggtccttgggtgtatgaatatgaacgtacctttcgtgcatgagcaaaacatgaggccgacctgagacatcgggatgaatcgtcatggggaagacaaactcgtcgtattctcgatagaaatagtcgaagtgatcctgtattaaaagaaccacgtcagaccaaattctcctggttctggatgtaggtagagactaaccttccaaatatcctcaacatcacgcggattaacccatccatggctattcgccgaattcttgataaacatcatcggcggcaaatcatcaatataccaactgccaggtatctccacaagtccagtagtattgcccctgacgagtggtttcatccacatctccgccttctgcttgtagtcaattttcgtccatgtatccccagtccgcagccagtacatctgacaatcctcatgggacatggaatgatcatattcaattccataagcgagcaagagctcaaccatctctgcactagcctcccaccacggcgcgacaattccgcgtggtggctttccgcagaactcagtcaacatcttatatgtcttgtcgaggatgtcgcgctgttgctccgtagacaagtcacaggggttttcatgcgagtagccgtgcaacccgatctcgtggcctgcgtcccggaccatagcacattcttctggaaaggtgtctagggtgtgacctgggatgaaccatgttgctttgatattgtatttttcgaaaagcttcagcacgcgcggtgtgccgatgtgtcctgcccagagacctgatttttatgagttttgtcgatgtgagagtgacgatctcaatgacacattagcttacctcgactgatatcgctcacgctatcctcgcctccgtatgagcctagccagccagctactgcgtcgatgtcaacaccgtagccgacaagaactcgctttttgcccatggtgattgggtttgatttattgctgatgacagggaggttgaggctaagattaagaaaaataatgggaaattgattggaatcaggtgtaggcgaggttttgttgatggaaatatatatggttctctacccccaaccatgcaccacgacagacaaaggtggggtgatccctaaaggcgttcaatcggattttgtcgtattgaaaatatcttcatgttatggatagctatttatcttgatcccactcatgattgactccgactaccccacttgaggtcgtctgctctagcttgtgatctatcaccaccatgacttgttctggtatagttacaataggccgacatggatccatggatatgtgcctgcaagtttttaaccagtcctcaatagggattttgctacctggcgttaactctaaattgatcgcacacctttgtcgtcatttcccccttcatttcctgtcatcttccccccatcacgctcacgatgcccgaaagagaacctcgtctagttcttcccaagatgcttggtgaaacgatcaccacatactgccctgatcctgatgaccttttattatcttctctttacaaaacacacgaatggattatcatggagaggctgagtgagggaccatgcccaattaccccagaggattttaaccaaggcatgggttctgtatctactactggaacatatctttgtcgatgtatagatgaccccggatttgatctcgccttcatctgtatctataaagaaatccctctggatggcactgagtttaataatttagagaatcggaagaagcaggctaccattgaatctttcgtggaactagatgccttgaagaagtttacagagaccgagtgtactgctatccctaaactccttggatatcaaatcaatagccaaggcgtgaacgacgttatcccccgcggatatattattcaccttatattcgaaaaggtccgaggagaacctcttgaatttgaggagttctggagctttcccttatataaacgcaaatctatccatgataaattcaaagttgcctatatatttgttatatagtctaattataatcacatctttcgagctaactagaattagggaaattctgaggtataggttcatgcttttatcaccggaatcattaaatatcatacttgataaagacacaggtgatatatatggtatcctataccctgaatactcttggatcttgaactaatattacatagcaaaatcaccggtttcgatatggctatagagatcgacccagagtacgaatggacagacatcaacttcgtgatatatgacctggtcctgctctcctcgaactatgagaagtacgttcccatggcgaatgatatcaccactgataagtacgagggctggaggtggtgagaaggagggttgatgctaaatgtcatgatctttttgacttgtttgcttgcttgcttcctgtttgctgttgcttctttccttggttcatagatgtttgctagctaagcgagatgattgatatctgccatgtttgtagcagtagtcagctatataagcaggcaatggccaaaggccacaatataaattccacgtagatgaacgactcatgactgtaactgcggtctcgcggtctcacacgaatcttcaaaataaatggttcagaattctaagctgtgtcgattgtgaggcgccagatcgacctttaagaaaaaaaagtaaattcaattaaataactaagatggagaaagaaagaagaagcaagttgtaaagtggaagcaaccagttgatatagctgaccactttgcaaacgttgcaaaccttgaaccttctcgcttagtgacctagcaaacaatctgtctaatgaagtaaacaatgcaaacatgaagcatttgatatcgatctattgtactctgtagaacgtgacatcaatccctcaaagtttcctttcctcaaatccgacccactctcatgacaccccatttagatgaggctttgataaattccaatatttcttcgattgcgagtcggtaggagcaagctatggtattaaaaaagataggcaaagatcagagctcttatcgtgcgaatgaattgggacaacccccacctttgaagcttgcgtactgcgtggatttcccgaagtggtttagtatcactctagtattctgaatacgcatcacatgacttacgaccctattcagagatcacctgatcccctaatctatctgtcaccatgaagatcgaaattaaatcgtgggttcgaatcaaatactctcagctagctagcatttaaacgccgttttcataattaatttttttttcctattggtggtagttaatttgaattaattcatggggaagatcatgtgatctctgaatagcttcatgttattgacataacaggtaatctctaaataccaggtacggtcctaagtcatgtgttggctatttagaatactactagttaggtatagcatgtcgaataccctaattaattggttatgaactttgggagggaaagcatagaatgtttgatattgacagtaaagaaggtatgactccagacatgatggagtaactaatgtattaatgtatttatttgagcccaagtgattgaataatatcttaatataaccatccatccaatttccaatctatgatggtatacgaaaaaatcccaaagcatcttctcggcctatccatcatagcgcatcgtgtccatgtgtctcaaacggcaatcccagacacaaaactccgacaacaatccacaatgccgcgctcgcatagattggtgcagtggtaaaaccggtctgcgacgagataatactggcgacgagtcctccaaatcgaaggagcgcagccgctgttccgcaagccgtgccacgatgaggagctgggaatgattctggagtgaacgcgtacataatagcgtattctgtgacactgattagctatgaaattagacatcggccatgatagcagtctcaccgaaattgcctagaaggctggtaacacaagaaaatgccaagtcggctgatggagtgttgactccgacatatgcgaagaggaacacgcctgtgacagcggctgaaattgacatcatccatcttcttcccatgcgggtattaaccgatactgcggcagataatggtccgactattccgacagctgatgtgatgcagtagttgcgatatgttagggagagagacgatttttctgtgaatttggtcgcaaggtaggaaggtaagaaggcgaagaacagcgggtatgcgattcctgaatagtgtgagtagagatataataaggaattgcgtctcacttaccgactgtcaaccagatggcccaaatgatcaatgtctgtctaccgagctttggagttgcgaacagtgcacggtagtgctcccctcggaacgcttgcatgttctccttcacaatttcttttgttgacattcgcttagactctccttcgctgggagtatttccaaacctggcatcgatttcttgaagcatctcaagcgtcaggggctctggctttccattttgtttcgcaacataattaatggcgttgaccgcatcctgatctcttccctgggagagcagatatctgggggtttcagggagtttgaaaacaaaaatgcgtatgatggtaaatgcgagggctagacctcctagagtgatgagtgtgtatctcctaatgattcgaaattagcgtggaaatgcactgtgtatcatggggctcttaccatcccatgttctggcttcgagaacatgtttctggggtggcatcagttggacaactaaagtgggctaggaatacccaagaaatcaaggagacaataagttgactcagattccaccaagccgaaagagctgtgagaagatactgatgactggaggtctttgagttagcagcggctcacagtaatatcgtcaaattgaaaactctcaccttcctgggacgaattctagaaatatcatcgaatcaacaggcacatttccaccggctgcagttccaatgactgcccaaagtgcactgaatgcaatgaagttcattgaaccagcagcggcacacagaaatatgccagcaatgagtagcgtacaattgaaggctggcttgcgtccaatgagatcgctcgatagaccccaaaacgaagcacccaaaatgaggccaacataatacgcaacggaactgtagctgacttggacgataccagtgaactcttgcttgataggtggctggacacttccaatgccctgtgatgcaaactattcgaagtatatgttagcaagagtgatttcaggaggaaagcagtgatcttgcatacattatcgactatccatccgaaaccggtgaccacgaagagtttccattggaacctagtagtgccaggatatcagtaccgcaatcaactgctcaagattgagaggagtgaataccagcccattccaatttcctccaggcattttcctactaactcagacttcaagcggtatgccttagtggtagaggatccgtagaaatcctcaacctcataatcatcaatagtcgttagcttagaaacctcatagtccggagtgctgctctctgttggccggatctgcttcttgtcgacttggatttcgtccatcttgcaattggaaattgagtgaggaatttcttgctctcaatgtagacatattcgggtcaaatgtcgttctcttttagggctacgatgttgctgccaatcgatcatcttgtctgatagtccatacacttcaggttgatacggatggatccggctaccaagagtggagagaaaataaggtgccatcccactcttgggcccgggacgcgttggatctacgatatcacaacagcttagaccaggccgacaattacttggcggcttcactgcacttcactctattaggtttatcgatcaattgagccaagcaatacatggttattcagtgctttttcgtgttgtgtgctgtagaatgtgctaatattgcaatttcttacttctattttggggttttggggttttcttcggtacgagagcatcaaatatgtagaaatatttataattgcaatatggataacactaggcaccgaccgcagcaacaaccggaataacatctgccttctgtaaatccaaatccttcttgaattcctcagcgcggccatagctctccttgtaagacgctgtaatcatatcctgcacagtaattggaccgtacttggcaggttccccctcttcgcgacagttaggcaaacactcgcagatatagtccgggtttccactgaaaaagaacggaatcgagtatctctctcgaccggatttgttgatcacacgatgggtgttggatttatatttgtcattcgccatgcgcatgaagaggttacccaaattcacgacatacgctccaggaacgggtttgacctatcaataaatctccgtcagagccaaggtcaagacactacgtcagtcataactcacatccagccattgacctgatggcgcatctagcacctgcaacccatcgacctcatcctgtagaaggagagtgatacatccaaagtcggtatgcgctccgatgccgcgattcaatttctcgtcggtgtcctccggctgcgcgggatagtgcaggtatcgcattgttgcaacggctccgtctgtgagagggtcgaagaatgttgattcaactcccagcgtttgagccaggacccccaaaacatcctttgccagatcgaacaccgcgtggtagtattccatggttgtttcttggaactcctccttattgggaacagtagggggccactggttggggccactgttcagtttcttctccagatagtaggggtggtcttcggggatttcctcgccgatgtacaggccttctttcagctctggcccggtgcctacttctagcatttgcgaccggaggagttcatagcctctgttgaaagtggtgagatctacttggttagcagaattcgcgatgagcgggtaaggatcttactcttgtcaattttcaatttctcctccaggggaagatcaaagaagcgcctggagcaattcatgacacggttctgcaagtccagtgggatgcggtggccagtgatctgaaagaagccattgtaatggcaacatttgcgcacttctgcgatcaactttgattttgcgtcgctatcctctccatagaatggagagaaatccaagatgggtggagctgcaggtagagacatagtagtggtgagttaaccgatgaggtgtgcttatgtttgcttttttagatcgcgctgctttcaatatatttctgtggaattgaataatagctacttcaagaccgttcaacctcgcacagaagtccgacatctcgactcgagctactccagctgtagctggagctctgggatgagccatgaaagatgggggtggtgacaagaatgtccaagaatgggggtcaacggttttagctcgcagcgataagggcgtgcggggaagacatgggaagaacaaaagtcaaaagtccaaaccatatcctatctggagaatctggagatatggctattggtcacgtctggttggatatggctttttgtactagtagtacatatgtgaacgtgaaagttaggaggttagaagagaggaaatattgcttagtataagaaccctgtccactaacccgtgggctagatatttgagaattagcccttttgaaaatatagttactatgatgtctgagttaaaatcaaccgcaacagccaaggtggctgaccccgaagtcaacgtaggggaaaccaccacttatacagatcgcgatgccgaaaggtcctatgtcaggaaaattgatttcattgtgctcccaacgctgtgcttggtaggttatctagcatgagaaacatacctagtagaattatcgctaacttcgaggcttttgtcatcgcacagatgtacttttttgactgcatggatcgggtaagtgccgagaagacggcatatgcgttcccgaaacatgctaaccatcattggcagagcaatttggcaaatgccaagacagatggtcttgagaaagacttgcacctgaagggaaatgactactctctattgattcttctcttctatatcccattcgggttgttcgatctgccgtggaaccttttgatcaaaaggttttctggaagaatcatgctgtctattagtgagactctccaaccctttgagatttgcttggacttgctgacatataaatgaaagtgtctattgtgtggggagttctagcactatgtcaatgcgccgctaaggactttggctcgctacttgcgattcgcataatcttaggtgtttttgaagccggtttcttcgccggagctaccttttacctcaccttgttctacaagcgtggggaaatgggattccgcctggctatcatgcagtcatttgcagttctagcgtccgctttcagtggattaatctcctttggggtattccaaataaaccacccggcagtcaaagggtggcagtggttgtttattatcgaaggatcgatgacattaattaccggagctgtggcgttttttgtgctcccagatggggcacagaaagcatggtttttgactgatagagagagggcggcagcgacagcacgtctgcttcgtgatacctcgtctgaggtgaatactccattcaatctcaaggcttgctttgagtcatggaacgactggaaattcccagtgtggtgtttgattacgttcacataccctgttgcgtatgccactgcaatgaatttcttccctttagtgagtatcaaggagcgtattgtcgaacgttggctaacgatagcagatcgttcaacgattgggatattccgtcgtcaagactaatttatggacggtggcgccaaatcttgtcggagcagtattcctgctatgtgtggccaagtcctccgactatttccgcgaaagaacgctccatattgtcttttctttgacaatttcattcgtcggaatgattatattaatcgcgattgacgttcagaacaacaagggagtagcatactttgcctgtttcctaatggcagcaggatcatatattccgtcctgtctcgttcatgcctggcacaacaataacaacgtccatgaaaactcacgagctgccaatacgggcttttttgtaggactggggaatttcgccggagtactgagcgcgggcacattccgaactcaatacgcaccaaagtgagatactctgctattatataaaggggcatcgctaactgactaggtatctgccaactctcatcgcaacttgttgttgcaacgcagtctgcatagtcctagttcttggattaggaggctggatgcgcatggagaatcatcgccgagatagcaaacagggactaagactgagagaggaccagactgatactagtcagtttaaggagggcgaaaagagtcctgagtggagatacttcccttgatatcttcgggttgtccatgatatcgccaagtagccctagctgagaaatccaaattttaccgtcatcttttagttggtgtagttcacttccctggctatgcatagaaagtacccctatatggtttattcttttgactcttaagcttttacaaatatattgctttctactactgcgtgtcatttttaatccccttttagttataacgtctttaacgacatcatagtgtcattatataactataacctctattgtatcatttcaagcaagataaatcgaggccgataggcggttgactactattatctgatcgaaatcaagtattcaaatcttacgatgcccctggggtatttggagaacttccccaacatccgcaatcccccggccctagtgggaaattgaagagcgctaagtggccaaaacctcaattggaaagaaatcgtctcgataagagctttgcatatctttttcaaattataccaatcgggaattagcgtcattttgtccccgcatgcttatcagtagacatcggcgtttaccccgagtaaattattgtcaaagacattgaagtgcacaaccagatctcgtttcgcacatgggcaactcaggcatgaaaaaccaggaaaagcatccgtgccaacacccaggctgtagcaaaagcttcacgcgagcagagcacctgcgtcgccatgcgctcaaccacgagcaggcgcgcaatgggtatacctgcgagcgttgctctgttcactttcaacgctcagatttgctaggtaagagaataaactaggttcggtggctaggcaggtgctgatatgggtccagcgcgacatgtggaacgacaccagaaacgggatctcgaagctggagggcctgggcaggggacactcaagactcgaaagagaacccgcagagccgaggacggttcgattgttgttcgtccttcgcagcgacaactgaggactgcggctgcagctcgatccccgatctcggcaaatagtactagtcaggagccagaactgcgagatgaggtagagtattttaatgataatgttcccttgtcaccacctggctcgggcactgatccaacgtcgatctctatggatgacacagacccgtttctggcttcgttggtgccagctgggccttttgagcagtatgttgagccagtgcctggacagttcgatgcagcagatggttcttttggtgttgagttggatgggattggggattattttggaatggacaccggtatgggtgactccagctcgttggtcatgtttcgtgcgctaatctcagcagcaaccgacttcaacctcccatttgccgcgacgtctaattataattggctgttcgatgtttcctctctcgacgacgctttccatcaattcaacctccccctcggtttcgacacggcgcccattttggaacaattcgactcgaattccgccgaaggaccggagaaatacgatggcccatcggccttactcatggcgtcaatcatggacagaggcgaaacatttggagagaccgcctcacctgcagtacccagtctcccagacctggactggatgtctggtgcggcgacgctggaccctaaccctccaatgaatctaccgacaatatctgaagaagcccgaaaggggattctagcactcgttgcacaggcacatccaacaagcatggatggaaatcccatggtactcgactcgccactcctgacactccccgcgctccaggcgtattgtgacatgttcttcgatcggttcaacacgacataccctctgattcaccagcatacgtttgacccaagcaccgcgccaccagtatttctcgcttcgattatcttcatgggcgcgacatatggtacgcgtgaagctcatcaattagcagtggaggtccacgatgttctacgaagccagctactctgtcatccggatttctcacctcaggctgacctgtgggtcctacaaaccatgcttctgatagattgtttcgggaagatgcgagctggtcccaaacagcgcgagcgggcacagttgttccactgtgtgctaatcaaaatgatcaggcgcagcaactgctgtgggatacgcgacctgtccaacgtcaatcagtcaggggatttggatcaaatgtggcgacaggctatggaagaagaacagcgtaagagagtggctatacactgcttcatgtgggatacacagcacgcagtattattctcgcagtcgctctgtatgtctgcgttcgagatcagatcttcattaccgtgtggtcctgcagtgtgggacgcctcctctgctcgggagtggtcgcagcacgcctttcgtgaagagaacaggcaattcctgactgttttgaaaggatatatcacaccggcggctgtcgcccgacctcgagatttgaatgttttcgctcgaattgtcgttctacatgggttgatgtctgtgtctgcggacctgaaacgtcgcgatcagacaaccctacggtcggagacacccgagcgtgtcggggcttggacgccgcgcatgggtcggtcctatgacctgtggaaagtcgacttcgatgccgattgcctggcgattaaacttgctcagactgccagtcctcggcagttcacggggctcaagatctccgggtatgccctttaccatgcagcgtatctcgcgttgaatgtcgaggtcctcgatttgcaaattgtcgctggcgcgtgtcagatcctgggtcggacagttaccgaggccgatcaggcacggtcgctgcggaatattacaagatggctacaggaggaatccggaccatcctgtagtactgcacgccaagcggcatcattacttcaggatgcggtgttgagtcttcatgactgggaccaggctgattccttccacttcccctggtgtttatatctatgcacgttggcctgctgggtttttcatcgtggacctaatctcacatccgacgacaaccgaaccaatactgatctgtcttcgttgatcgtgatgctaactaattgtcctagcttaccggagctagcggttttatctggcaaatattgtcctcgccctctagcaggagctatggctaaacaactagcgactgtccggtgggctgttgttcacgatgctatgaaagttttgatgcgattgtcatgatagtctttgtattctttgtatttgatagtcaatatgtagtttcccaatccgacatgttgatctgaacaagtgcggtttatctttatctatttactatagaaaggataatcggtataacccttctgagcaggatcagcaccatagaatgtcgtgcgatcataaggagtcaaaggcaaaccctccttcaaccgacgcggcagatcagggttggagatgaaataacgaccgaacacaatagcatccgctccacccgtggcaagcttgacacccgcattctcggcgttgaagtttccggccgcgaggagagagacccctgccttcttcagtgtcggccggaacacatcaagtgacggcttgtccgaagccagggagtcgatcttagacgcttcatccatcacctcatcgaatcggggctcgaccatgtgcacgtatgcgggccgcgattcctcgggcagtccagcaatctgcgaacagagcgcgagccagtggacgttggggtttgagtcccgtgtatcttggaaataattgtagggcgacagacggatgccaacacggtcagctccgatctcggcggtgacggcctcgaggacttcgattatgatgcgagatcgcttttcgatgctgccaccgtattcgtcggtgcgagtgttgacgttgtcgtggagaaattggtcaaggagatatccattggcacctgattcgttagtcacagcacatcatcaaggctggagttattcttaccgtgaacctccactccatcgaaaccagcctcgcgggctcgctttgctgcagcagcatactccttcactgtatcttggatttcctccaccgtcatagcccggggtggtgaagctgcgtactcagatccatcgagtgcgtttccgctgattgggatctcactggctccaagaacttcccttccttcaatcaaggaggaaacagttgcgcggccaacatgccacagttgacagtatatatagccacccttagcatgcacagcatcggtaaccttcttccagccagcgatttgcgaggaagtaaagatgccagggactcctgggtatccggcggcctgaaaatgttagtttctcgaactagtcaaaccggtcaaactggccaaacagcccaaacagaagaaaattcacatacatatctgctaatcggagtcgcctcggtcaacataaatccttcatccgaagctcgctgcgaatagtactcgacattaagctcattcgggacataaacaccctcggactccttgctcgctctcatccgcgtcaacggtgccaaaactacacggtgcttgagagtcagagcacccaagcggacggactcgaacaaaggatcggtgactgcgattgaacccatttcgtaaggatatatttactttgcgattggcacattttggctttggctaaggtaatatttatagcttggaggggccatggtatgccatttttggcggttccattcttgacttttccattgaaggtgggatcattgatctgcttgaatagtgggatgatggtgaggcttgagggttcggctatcaaggaaaacaacccccactgtaaaacgagctcccccaccctcgaatgtgtctccactacccctttgggatggatatggtggtgatctgactgccaatgtatgctttaggtaccaacccctgaatactaactctcgtactccgtcgtctcaacaaatatcttgttgatctcactaatagtgactacgctcggttctatccgatcgaattgctaatttcttctcgtcaacttcatcccactatctagttagagcataatacctcggttgactgtgtggtgtacaaaaaagcgatgataatgtagaccacattatacgcaatttatatgtccacattggagagcatattaatcgaatagaagtgtacaaatagaaacactacgactaacctcgttataaccatactagaacaaagaaattcccaaaatagaggaaaagtcaggtcgaaaagacggcgtgaacgtgtcaataaccacaatttgtatattcatttctaaaacgcaagcccaaagagttactcctaccaaatattataccaagaaagagaaataatcctgcaaccactgccctatgacacccacttgttcggtgtcccaagtatcaatagccccaacatatccgtcaggcctcacaacagcgatcccaattttctcctggttcaaatccccaaaccacttctcagtacaactcggccctccaatattgtcgacatataatgtccaccgactagcctgcagtatttctggcagatcagcgatctcaaactcagactgggaagattgcgtgaccattgcgaaagtaaaagcattggagacagaagtgtagcgctgagcctgaacaaattcatctgacggggaatgccccctcggatgtttctcatacgactgatttgctcgcacgctgacaccagcaagaatatattgcaactgttcacatatattctccagcgattcccgggagcggtaaacattcggcacaaagatgtagatcttgaattgacccaagagcggaacatccaactcgatatcgactgggttagcatcaatatagcgagtgaccttagctggcagctgaagcattccaggctggaggcgagctgtggtggttggcgcttgtgtcaacattcccggagcatattcggctccaatgccggatataaaccgaatattgctgtcgaagttcttggccaattcttcatcgcctgctgcgaacgctttgcagtgttcaacatcgaagttgatgaggtcgtatgctatcttttgtctttcttcttcgtaggtgtggagtaaggaaggcttggccagtcctcggactaggaggttgagcttccatgcgaggttgaagctgtcgtgcatactcgtgttggcaccttgggctgcaagagcagagtgacagtggccggcctgtatattgattagactatgggtgatgtgaggtcaatccggtgcaacatacgtctcctgcaatgaatatatttgcctctgaatccatgaagcgtttcgcaacccgctggcccacaacatatgttccaaaccactctactgtcttccattctaggctgaacggatgcattgcctccctcgcgcgactcatgacatattcagtcgttgcctttgatttttccactcgctccccgtcggtggaactcaactccacatataatcgagtcatacccttctcgcgcggaatccataagatcgatccagcggaatgagaccgcaaggccactttactccatagatcagggaagtccgtatcgatcacacctatttggtgagccaaaaatcgtgccaagagattgaaaagacataccatccagcactccccacgccgcgtttgttaattcgccctcgagctcagcatccgggatgaatgatcgaaccttcgatcgagctccatcgcaaccaaccagataattcgctctgatcttgtgagccgtatttgtggtgacatcctcatagataatatccaattgtgtcgttccattcacaggcgaacaagacacgaacttgctattccgcgtaatagacacaccccgtgcctccatatcgtcaatcatgacttcctcaaccatcccctgatgggctagcaagatataagggtcggaggcaccaacgtgctcggggtagtggactttgcgacctgtgcgtcgaagtgagtcgttggcagttgactcctgccaatttgttagccaaatccaggagcagaattgacctaagtcctacccagaaggatatgtcgtaaacccgagctccatttctcagcaatgggtctgccaaacgaagttgtctgaatgtttcgatggtcttaggttgcattccgtcggcctttcctgtggatgtcttgtcgggacgatcgtccagaatcaccacggcgattccaaagcgaacaagattacatcttcaaatgtgttagtataccgtccgtcgaagaaggaatttacatacgcaagcatcagccccgacggtcccgcgcccaccaccacaacggtagtagaagcatcgacagagccgattctgtagccttcgtggtctgcactaggtgacattatagaattcaattgttggttgacaatcacttaattcatttctatcttctctatttattgaaatcgatgctgcggggaaaacccccactcttcactgcagatgtttatcaccatcgtgtcaccccaccgtccacaacaatgtccgacccggtcatgtacgaactcgcgtcgcttgcgaggaatatacacgcccccatgatatcttctggttcggcaatccgaccgttcatgacttcggacttccagccctcgagcaaatgggggaactggccattagcggataacctggtgcactgccttggtgggaacttactgaagcggtcatttctgttttcacgaatcctggagagatggaattgactcggataccctgttatactaaattaatcaccgtccgtacaatagtttgcgcccaactcacatattcagccagctctttggcgatcgcgggacacatcgatctgactgcgccctttgtgccacaataagccgaacatagctggctgcggacagcgatatggctcgccatactggcgactaacacgatgctgccgtgctttgttttgttcgcgatcatttgcttggctgcgagctgggcagtgaagtaaagcccgaggacattgatagatagtagatcctgatgatccttgtaggtaaactcgaggaatggaagatgtcgattaataccagcacaagggacgcaaatatcgagagcgttttcaaaatccttctggaagctagcgaacccttcttgcaaagactcctgggatgagacatcgactctgttgttgttagcgatgaaacctgaaatgaacagtcaacccacttgtaatacgcagttcggacaccgcaatccttttcgattgcatggaatccttcctctggcgaaataacatcaaacacagctacatcagcgccggcctcggcgagcccccgcgcaaatgctagcccgcaaccccgagcacctcctgtaaccagtgctgtgcgccctttcaaagaaaactggctcggttagctcgggccaagaaaaagttggaaacactcactctcgacatatcgcagtgtagctgaatattgtcttgctgtgtagtgaagcctttcccctcagacatgcctcccttttaagctatcggatagcggcatacccacgctaagctaacccccatctttgtacatggttggagtagagtgaaataaagatggagtaaccatatcccatgtgcctatctatcataagtagtcctgtctgacagacgaccggtattcaacaattcaaacatctttcatccgggttctgttacacaccaatcacaatggcccctcaaatccccatcaaagaacaagccacccgctgcgtgtcatgtcgactcaaggttgtcattgtcggcgcaggtctcgcaggcctcgggtctgcgattagttgcgcccttgctgggcatgaggtccaggtcctagaagcaacacgggaaatcaaggaggtcggcgcaggtatccagatcctacccaatagctcgcgtgtactgcaacattggggtcttgaagaggcacttacgccacacatgacctttccccgggtctgtaatttccttggatggaagggcaatcccatttcgtccatggactttcacacatcggagagtaattatcccggcacctggtatcgtgactttcatcgtgcggacctgcaaaaatgtctggttgagagagcgctcgaactgggggttagtatcacctgcaatgctcgtgtggtggatgtcactgtgagcgaggatggggccatcgctactgcttctgcgtcggatggaagacagtggactggagatctcgtcattggggcagatggagtgtttggaaaattgacggaaggtttgctcggcagagtcgatccgccggtcaaaactggtgatcttgcataccgtttgctgttgtctacgaaggagatgcttaaggatcctgatctggcggaattggtaacagatccccaagtcaactattggttaggtccggatgctcatgcgggtatgtgtttctcttcctggtctgggttttgtcgttaattgtgtagtgaactatgttcttcgtagtggagaattgttcaatatggtcctacttgtccccgacgatattccagaagaatctctggcatcaacgatcgaagggaatgtggaagagatgtgtgctttgttcaaagactgggatcctcggtacattctacgatgaccttcacttatggacacatggctgactataccagtatccccaaactactaaagctctgcgattccgtccagaaatggcgtctttgcatccgatttggagactttgactggactcatccctccggggcgtttgttatattaggcgacgcagttcacgctacattgccatacctggcatctgggtatgatagccttatatttacttaattccacattcactaactaccacagtgccggaatgtcattcgaggatggagcagttctaggtgaatgcctctctcgactcccgaatagccccggaatctccaaaacctcggccgagttcctgacggccaaacaacacgccctttccatcttccaggagtgtcgcaagcaacgaacgaaaatgattgtggaacggggaaatattcaacaatatctctatcacctacatgacggcgctgaacaggaagaaagagatcgcaagatgaggatggtcccaactcccgagggagaagcattggcttggcgagaccccggtttagcacccaaattgttgggatacgaccacattgcagacgtaagtaatcgtttcaccgtttcggcggctctgaagttcactgaccgtgcttaggttgatcgtcgatggggtaaatcactaggaactagtgttattgactcgagactatagtttgatatcaccattcctgtcttggtctttcttgtcattctctgctataatctgctatatttgacctacaatcatattattttagacacatatgtctttagaagtttcctcctaggttgctcgctccaattacttgacctatcttggcctatggcttgttggaagctgcctttgatccccaacacttaggaatcaagctcccaccatagtaagggagctttttgacaggggccggcgtgttcttgagactcagatgatgaaagcagcaatataaagtatgctagttactcgcagcagatattccaagttcttttgggttgtcttttcgcgtgaggtttgagtgagatctttctagatatgtgccttcttccatatcctttgttataccgtttgtcatactgtttgtcatgtcctttttcctggtcaccatttgcagctgtgtcaaactcattctgctatcctactcccctttacacccttccaaagtcggtcaccttccttcttgtcttcttcttatcttcttagcgcaacaagtaggatctattcatatctggatatctcactttgatttggacggagattttccaagcaccagggcaatattcttaaaaggtatatatcttttagcatcgggtctcagctatccattcccaatacctctttcgtgtgccttactgaccgtacttgtgcaaggacttagaacgatgtcctccgatgaagcccagaaacgggcaaaggctaccaagccgcaaaaatcaaagatttctgtatcccagcagatgataatgataggaatgagcttgtttcgcgtaagcctggattgaggaacatgaccatacacaccatcccaaaagactggtgtttatccgcctcggaagcaacagactcgcaatatgccatgcttcggtcatattctcccagagcatcctctatcaacacttttctggacgaatgtgatagccttggacttacgaatgatctcctgaacgaagctgataggatccttgatgcctctaccgaatggtcccggtttctacaactcctccggaccgaggattctgtcgatgatatggaagccacagatgacggatggccagggagggtcctttgcaactgccaggcgtctgcaagagcagacaatgactgttggcggggtgcgagacagagacataattcagaacacagcggtaagatctcgcagtgccatgccccattcaactcacaatccagaggttgagtatgaggcaatctcaaacgcggccgccataatccttctgcagacattgtcacacctcgtcaaaaccaacctagaatggattttcaatcgagttcacttttcatgcaagtttacaagcatgatgtacaatgtttacaccgacggagctttgcggtcaaagaccacgtcgaaaatatttggaatcttggaggtgaaaaaaagaatgcgcacggtgaatccagccgccatcttcgcccaagaggcctgccaggtcgcggggtggttaatggaatcatccgcagagatggctgttttcaacaaccagtaagtttgatcgcggcttaatgcttaaaccgctatgaatggctctataggattcgactaactgatcacaccccctttctagttacatgctggtttcgcaagacagacatcaattttttttgacctttgcacccttcaacgaaaactacgaaagttacttgcacaacggaactgacaccgacgtgtttctcgtcatgcacacggttggtcccttttcgacatccgacgctcgacaaatggcacaattcgggcgtatttttgtcgccgctacactggttgccaagtcggctgctgccaacattcattgaaccgttctccacgtccactgctttctcctggttgatgtaatagaccttgttcgctacctttaccaaataaaattgttctttgtgtctactgaatgaaacccaataattatatatgtcctctattgtagatagcgccgagaatatgaagcaaatgaaatcagctcctaggaaagattcattgataagttaactagaatactgagtccataagaaaggcgtctttggttcaaggtagacagttaatccttgtccgttggaagagaaaagactgaacattagaacttgattatttgcccactccctctgaatcatgtggctctgcatctagcctgggccttctgaacttccttgcccggacggatccaaacatcctcgcaagcgtatgctctttttgtgagctctgattcatgttcagcatcttttgccccatctagtacatcaagagtgcaaaccttggggatgtcgatgacaactgtgggtttgggaactgtgggcattctgggatttccgactaggtcggcggacatgaatccgagcagaatgttcatactctcatttgcgacttcgttagtcgagaaatcaaaaagctgagtcttcttgatgactagaccatcttggctggattgggcttcgattacacgagcatttattccgccaaagactgtgatagccataatctatattaaaatcgatatatgttagtcctcaagacatataagtacttcttgagcctatacttaccggaattgtattgtactgcaagaagtcctcgttttgaagtcgtgtgatcatagcagtggtaatagtcattacctctgcccgaaacagcccttcgctaggctgctctccaatcacaatcgtgatcatgacatgtgggggacgtggctgaccaccactcggtgtcttcgccacacatggtattcggcgaccatcggaccgatgtccaaatagctgggtagaactcgtcggcgatgattgacgggacattattgccactatcaagcgtacgttggtctacctattgcatcgtaatggaaccatatcacttacctctccagccatctagactcttgcctaaggttaggtggaactctgtcatctcctggggggtagaactgtcggcgaaactgaaagaacatccattctagagccgaatggatatacgatgcctgggaattagcaccttcttttgagaggcgatctgtgaattcctcccatcgctcagtaagtgaggtcagtcgtctctggtaatcggggttggtaagaacaatgggggggaacccatgcagcacctttgggttcaaagaaaaccggcccgtggggatcagaatatggagcataggtgtgtcttccattctcgtctatctcaagagatcgaacatcgatgtgaagagactggtaggattcggggtcgatctcgatagaggtgagactttcggccccattgtagacatcgttgatagcgttcagaacttcgctgtgagcttccaaggagtctttgatctgttggcccgcatgacgatgtaacgtgggaatctttttgagcatgctgactaggctgaagagctagaaggaaagcagaagttggaagttggagaatccaggaatggtgggtcaacaatgaccaggtgaggtgtaatggggaatgatatatgtccccgtttggcttgttccgctgatggctgaggcccccgtttccccaccacaaaggagcctcacacctcctttctgtttattagtgtctgtctctttattggagagatatctttcttctatggtcatttcaattctcctgtatcctttgccaatagcgcccggccattcttcaacctgccgaaaaggagtatggcgtgaagatctacgtcatttccaagtgcatgattcaaatccccctgatttaagctgttagctgagtatccaagacactttccaagaattaatatttgattcctgttagaatcaagacgtgagacccaacattcttaaggtgagatgtagcatagacctacgtgtaagggatattattttccccctcggtcgatcgtggggtaagccgttaggactagcgttatcgtcagggctgtagacccccatctttgatattttggagtcactaagctccacgtacctctatctagggcaaaaggtccaatttattgaaaataaaataaaataatcttatcgttcatgtttccccccattttaaatcccctcacgatacatcgatacatgtccaagagcacctatatagactttatgctcgtaatcccaatttgattcaaacgtatcatccattcaaaatgtggcggattttcagcgcaggaaccacggcaaaagaagaccctccacatggtctaccagcgtcatggtatcgctcagaagcaatgtaccaattggaaagacgggcaatcttctcgaagcgatggatgctgctcacccactccagccgtttcaagaaaccgggcgattatctctctttcacaatcgccaacttctccttcttccttatccaggaccgcgacggcacaatcaacagcttccacaacgtctgccgtcaccgcgcattccccgttgtacagtcttcctccggcactacatccatcctcagctgcaagtaccacggatggtcatacggcctgaagggcaatctcgccaaggctccgcggttcgagacagtacccgatttcgataaaacccagcactcgctattcccaatccatgtgcacgtcgacaaagctggctttgtgtgggtcaatctgcaggccggtgagacggatgtgaaatgggaagacgattatgagaaagttgacgaggagccccggatgcaggactttgactttgccgcagaattcaagttcgaccattactgggagatggaattggacgcgaactggaagggtgtgattgagaattataatgagtgctaccattgcgctacttcgcatccgcttatcaacggcgtgtcggatctaccaaaatatcgggttgagcccaaggcccggtatatggaacatcatatcttcaataaggaaggttcggatagccagtttcgacgggcgatcacgtatttctatccgacgacttctgttacggtgacgtgagtataggaaatccaaatgtgaaagtcaacaccagggctaactaagaacgaactagtgataaattcttctatatccagcgtatgattcctgtttctgctacctcgagcaagatcgaaaatgaggtttaccgtcaccgggatgccacagatgaagaatttgagaatatcaacgcgttttacaggcaggttctcgacgaggacaaggagctttgtgttggaacacaggagaacctcaatgcaggggtctttaccaatggcgaactacaccctagcaaagagaaggtaaatcgaactgtgacagtgctaatacagcggctaaccgcgacattagggccccatacactttcaaagcagcgtcagacaaatggtcatagaacaccggaaaaatgaggaaaagcaaggaggatccgagatttggccggccaccccgaaccctcagttctcgaagggttcagcagaagatgagagcttttgttcgcagttggatgcttctagttgtatggccaaaccggaactggcctggtagccagatacacatgtacctgggcgaaatgcaaggctgaacgtggaactgcttacagtcaattaccaattaggaactatttcatacttcgcactttagactagtcggggagatccccagataccgaatcaaagaaaaaatacaagcaggactgtatcatgaattcgctaaataatacccacaggcgaagataacttagttattcaatccaagagggttatcccctgtctgcttctggcccccaacactagaaacaccgttctgtacgccctctccggcgcccttcgccgtattgccgacaccctctgttgcgcctgacacggtctgtccaaggcctgatgttgcgttgcccacggttgagccgagaccgccgactgtgccgcctactgtatttgtcacgccgccgactgtcttgcccaaggtatcgcctaggccgccgaggagtccagctatggatatttgtcagttggggtgggattttgatggttggttattgggaacgtacggttctgttcgttggacatggtgattatgtggaagaggctgtgtggtttgagtgacttgtgtggtatggagtgtgtaactgaaatagttgaatgtgtgtcaagtgttttgatcttgatgtagtgagatggtaggcatcgctgtctttatttatatcaccgccctgaaactggttacatagccatgacagccatcttgaggctaatatcttgaatgtatccatctgacgtactgacgtaccccatatcccccgcagtgtagataataggatgttattattggttgatattcgccgatcacatgggtacttattgtccgattaattgtttcaagaaagtctgttatattaaaagaatgtggcgaatggtggatgactggttggttattgttggtcttgtttgcaagggtatgatgtcatttttcgttcggacctggccaggagattttatattaactgtagctggatgatctcattcccgacggaattcttgtctgcagaggtaaattggtgcgtatcatgaaggctattacgacgtacatagaaggacaagattgtaaataacccatcgtgtccaacaaaggaatacatcgtcatacctatttacagactcgcctttccgcgagactcatatggcatgaacaacacaagaattcccgctgcgaggaacagcgccccgctaacataaacaggagcagcggttgtgagatcagcaaacattgcaataataggagccatgatgccaaagatccggttcgcagacgcggtcaatgcgttgcccgtaccacggtccttggtgagaaagatctcgggggtatatgcatataaaacggcatacatgagactactcatgaaattaaaggcgcagttccaacctagcagagcatttgatgtggtagctgttgttgacgcaagaagaaaggctccagttacagccgttgaactagagagagcacccttgcggccaaagcgtggcagttcaaccagcactccaccgagcagacagcctgggatgcccataacggcaataatcaatgaattccgatacgtgatatatgtcgatccgtcaccaaattcagcgcctctggactgctggatgtatggaaggaatgcattgtatagtggaaagccgagaccgatgaatgcccaaacgaggatgatcgaaattgtagcccatgctcgttttggggtatcgaaaagagcgcggagatgatcaaaccgcacggtttctaggcgttggcggacgatgtttgccgcgctgaaattctgtatctcgccctggtcccaggcgtccagatcggttctcgatagatcagagacttttccatttcttcgagcaacttcgtggacaacctccacagcctgttcgttcctccccttccccatgaggtattttggcgactcaaaaaccgtgaaaaacacaaaccgaccgacgaacatgatcattgcgatgccacccattgcgataataaaccatcgccatcccatgttttcggctttcgtacatccttctgcagaaccacaagtcctatacccaagcagcggccaaccaatcaaagtggcgacgacctgggccaaagcccagtcaatcgataagatagtcaacaggtactgatgagatccaggtaagaactcgagaaagatggccgagtccacgggcagattcccaccgacgccaacagaccacaaagccgcaaaagtacaaacggccgcgaaattaggcgatcccgccgcaaccaggccaaacaccgccgtgattccgatcgtcaagttgaacgcccatctgcgaccgaagacgtcgcatccaaatccccaaaacacagcaccgaccagcaacccgatgttttgcgcaagtgtcaaaagcggtgctttcgaggggtgaaattcgtttgagactgcggggaggatcagggacgtaacaatcggccacaagttatcgctcgcccagccgaatccgatcaccacaaagagctgccattggtatcggcccatgccgatcgtctgaatcgcttggtttagaacctcagctttggctttgtagtttgcgtcgggaccttcattttgagggacagctgggccctcgatcgccgttggctcaaggccaggcaatttggtcacttctggcatgttctgttgacaaagggaaggaggtaggaacgcagatggaaggggggcacacggcttatactataactgtccgcattctcgctctggcccccgctcgggtcgaaaattccatgcgtctaatcatatcccatgcagtagcttccacatcaactttattcaggggtctccttctttttccatcgacttggattggatggttttatggcgtgatggatggctagttttgtgtcagagtcagcgagaggaggttgtggcaatgccgtatgagctccgtggaggtttgacgagtcttcgggctttggcctcttcgcgtctcttttccgcctgaaggaacagtgcgtagtaacctaaggaggtcttatcggccatggatcttccaggggaataacgcctcgagataatacgaacccgatcgttgcttcatccggaaactattgtcaaccgatcacggctcccggcaggaggtaataaataatatagaaaagatgcctgctattccctaaatcgttgatccgctggtatttttttccgctccgagacaaagttgtgtcaccatgcatatataactattccacaacctgatacaacctgtagaactcgtaagtcccgaacacaaatggatcgcctgtcgcgtgtatgagtcttcaattagtcggattccataatgcttctgcaagataggtgacattcttatgatgcgtgcagtttgcgtgaagctgactgcacaaacgcgagctgacaggatcagcagcgctaatcttacatccggaaggctgactgcatttgccaggggtgccggaatacccaattagggttagccttgaaacaataccaattccagtccagatcgaattatacctcatatattccataaaccacctcgagtacttgagattgatttctcaacgtctccacgtggttcgtgaattgctgttggcaaaagagtatgctttatgacgttagatacgaagtctaaaatattgaaatacccctatggaacacttaccatgctgtggaaattctaatcagtccctattaccgttttagcctactatagaacatagccaaggcaaagcacttgagttgtcctgcatctaatataaccgtttaagcatgtctagcctgtaacatagtattgtccactgatattcaggcccgatggaagttgtacaatatggggccaaatcaatatctgagtaaattgtgtaaagagtgactagtaacatgatgattcgaagtttaaacttagatttgattgaattccaaaacgtagccagcaaattggttgaatccctccaaactgtccacatagttcagtcggaaaattcatcgaacccaatctagtcccattgtcagcacactcgctgttctcatcctagcatttagctccgccctcggtgccaccgtggcacgagtttgtgtggcagtcttgaacctctgtccactttccacctttgcactcgaccttttcacaaaaatatacattagcaaacatgaaacactattggaacctggacatgttgacatacaataccggtcctgtcacagccacagaagtgtctgtctccgtttgatgcctggcaagggctgtttgtacgtctttgggcgggatcatagccgcttccgcaggtgtcccgcttgtccaggaccgaagcattgacggcggtagcagccataagagtgaagaggatagcggtaaccttcattgtaaaagaagtgttttatatcaaaaaaagtggttgtgtgtctgaggaggttgattagaggcttgatgtccaagagtatgagtttctggaggatattgagacgtatatatacatttccagaacaaatgccaagtcgtatggatttcataccatggacagtttattcagattcttggagttggacgcctcgtgtgccaagtgccaaaagtatacctcgaagccagcaattggtcctggggttgaggttgaggttgcattgcaggaaattgaccagacgactctttcaggcccccgagctgaaaatgaaacgcctcaaagagatgtgtattatttactagaatagtagactatctatgtagatcaatcttggctgtttggggatacgatgagcatttgtgagaatcatccctacttgagcctatgcatataagcataacataccatcgggcccagaaacagcagtgccaaactggattgtccatagtaaaccgggatggactaagcaaccaatagcaaatagtggcccattgaagacatatagaatgtggtatagcttgaaaaacgatgatcaaattccgaaattccgaaattgaatttacaaccgcaaacccaattatacatcaaattaggtatatcatgtatagagcggccaggttctcgaataaaatacccaagaactaggagctagcgctctagccctggggatatgcaagaagacagacgaatctaatagatagtatcacatatattaattggttatacaaccagtatcacataactcgttaacctcacaaattggacttgtcgcatgactagaggctatcagatcacctctttcggctataaggggttcgtaaaccaaacctagggttacatcttcctacatgcatttttggctctttggcatttttggctttttcgcgggagggcggaccacgggagatccacacgccgccttttgaagagaccctttgcatgtccaaatggtaattgtgtatctttctttctggttcataggtaacagatacttacaatgaacagtgaattcctcgggattgcggtctgatagcaattatttcaaggggataggtatagcgactccctcttcagtactcaatttaacatgttctttgtcatggtgtgaatggtttgcctacatctgcaggtgcatggcccgagtgccagttgtgccttcatgcctgacttttgcctacttcctgaccacttgaatgtactgtaaatcatcgtaatatgaaggtcttttgtaatataccaatatcaggcagtaagacatcactatttaccggaaatggaggttagcccctggcatctagaccgctgcttactacagcccaggaggccgtagccccaggtcacgctcttgcaaccttggaatgttcaggtgagcattggagttcagcccaagtatgagacctaataaggcaaagtgactcgaactgtcttgtccatgtccgaggcaagccacccacatgatctggcaacgaggctgactacacccctctacgatgatctcacaagatttactacgtcagttcaaagttcaaggtgtttattgtcccggctatatacgcgaacaaaacctagtctccacagctaaagcaagccggttgtgcatttcggcagcagtgagtcctcgtatcacagaagaaacccgctactcaagccaaccgccatgtgtaaaatcacttgttcggactccggtcctcctccccatcatatccaagatgacatcttagatcatgagacgctcgacttggttcttgatggcgcggatctgggcggtcaggtcactggcctcgttggtagtgatggaggcagcaatcacgggacgggagacaccagtggcacggccaagagccatcttactgggaacgtaaacgtagggaacctaatttgaatgattagttttgtttatctggtgtagcgccctagggtatgggctctaggatattggactcacgttcttgtcctcggccaaaagaggcaagtgaagcacaatggcgagagggctggtatcggcggccatgatgacaagttccgaggttccgcggttaagggacttggtgcactcgtttgcgcccttcttcaattgacgatagtgcgccgcctgctgcacaagatcaagaaggctctgggcgagggcctcatcggcgatgggccacgctgcgctagtatcttcggccattgttgcgttgtagttgggaatttaaacaccagatcttgaagaaatggctcactcgggggatcacggccgtgtagttgaaacggaagataagtggaatgtagattgaggttaagttggagatgatcgtgggaaattttttgagagcggatcgtttggacacaccgcctactgaatttgcaagtatttctgcaactggttggcgctcaccgcccttgtttaattggccaccccagatatcccgccacccaggatgtctgcgccgaaatctttttcgaacccctacaatgtccacaggaataccacaattactcagtgatctgttagtagttacgccaaatctttctacatttcctcacttagatgtcctacaggcaataaatgactgcacaatcttaggcggtcctctcgcactgatcacatcaacaaactactcgagaaatcacaggtcttttcgtatcgttgtcaatatttcttgaaggcctcaaacccttaattcgtatgcaaatctatgaatctagtatcttgatatgctaattgtacagaaaatacccagccgcttaattggtgccgttcacagtggcagaggcaagtctagagcgcgcacgcagtgcagggccaaacttatacagaatgaacggaataaacgtcaagaccgtcgccaccaatgccaatatcaacccagcgtactgactacccacgttgtggaagaactgggaagcaaacaaaggcgacacagcaccgagtgtgttgcgcatgaaaccctgaccagcaatggcagaagaagagtgttctccgtaacaatcggccgtataactgtagcaggactcgaaaatgaagaagataccgatggtgatgagagccaatccgacgattggacccatccagtggagacccttgtactgggtgaagctgtagacaaataatccgatcggcagccagacggctccccataggacaccatacagccgatcttcgggtgagacctcaacgttcggattggaggcaatggagttgtatttgcgaatttgcaagaagtggaacccgaagccgatggtggttccgaggcagagagaaatatagggaagacctccgactccttcgccccagccgcgcttctcttcgaaggtaattggaatgacggacaggaagaggaaggccaggaaccaggcgaaactgatccaaagaccgaaggcaaagacgacgggctcggtgaagagcatcttcacggccttaacagaggagttgtgtaacatgtgtttgagcccaggggcttcgatatcattgaaggtcacgaaattgtcattgccggtggcctggcggattgccttcgcacgtttgcttaggcatacactaccacgggtttcgggcaggcaaaaaatgatgataataccaagggggatgttcgccaaaccctggataccctcgagccagcgccagccgagagcctggtcgataaatccggcgtagatgggcgcaccgactgtaccgagaatggcaataaaggagaaacaagccatcgggatagcacggtggtccggtatatacatatcaccgaaagtgccaccaacaagaattgtaccaacacaaccaaacaaacccagcagagcacgacatactaggattgtggcgatgttcttaccgagagcgagaccgatgaacataagacaaaagcaaacgtaggcaccgacatagacaactcgtcgaccggccagctcgcagaagggagcgaggaaaagaggagcaagtgcacatgtaaagttgaaggtgaaaagaccaagctttccaatttcttctgttgtccctagatccgctgccatgcgtgaaattccggaactgtatgctgttgtggcgagaccgatgaaaagtgtcatgaggcaaagctgactgctgatgaaggcctttcggcctatactccagttgaaggggttctgtttgtctccatccacgaagtccagcacgatgtattctcggccatcgtgctgcacaggccttgttgctgtaaggggaagatccacgtccacctcttgcaataagctgctgtcgtaatgctgggtctgctcttctgaaagttcattccggtactttccaccgacgattagaccctttgccgtgtgtgtctcgtcggctgacatagtgtcaactgagggaatattctcgtcatgggaagctgatataggttgaggatttttggaggccttcatattgacatagattgtggagagtgaaggttggaaaagctgtctaggggagaatcaacagcatggggtttggtccctttctataatttttaagtgttcctggctgaaagtcgcgtgatgtgagtggtgctccagactccagaatttgatgagaaccggggctgcgggattatacggagagtggggaagggaattccaggtaatgatcaattattatgctgccaacacggagaacaatgaagaacctgctgatcaatgaatgggttggaataccaagtaagtgggtatgacgaagactacgtaaaaatgctagtagcggggcgcttttcgtcgtcgtatgttggatacatacagtcagtccggtcactggggaaagtctcataacaagtctcataacaatgctgtctccaattctcgctcgtgatatgctattctccttcgcccactctcgtgcgtcagcatcagggcatgcttatgatgcgtatagatatctccggaacgaaaggattcatgtctcggatgattgccggtgtttgagttttccctatatcgccgacgatggtccgaataacctcccgagccgagttagctccacaattcaaagttattgtcggcatgccggttttgactcggattagatgcccgagtgacggaaaaaggtgtgataaagttcagcaaagaccagttgttgtgttataataactcattgaagatacatctatcctaactgaacttataagtgaagttataacaattcacacatgaactattgagccgcgcagtgacccactcgccacctgttccttcccagtgaactttccggtgagtcctattgcagtaggatttccgagatttgccccgtacctatgcatctaaacgatcatttccaataatatcatgtgcctggatcggtgtttcttcgccttccccaccagactcatgtttccccgcctaactctccggcttagctgtctaccggctgatccggtcatattgtcagggatcgttccccttcccacgtcatggtacgtagtacatggctcctcgaaggctagtaacctttatgcaatctttatgcagtatctcccattgtaacccctcaacttgccctgtcctggcaagaaccatacgcccaaacgctgtacacctattatatcgctgagggaatttcgacacctatctcatctcaacccttctaccagctcaccattgcttggcgtcgcaataccaaactttttccacctacatagtactcatatttaaacatcacttctgtgttccaaccaatctgaaaatcccacgcaatcaagcacgtagtttaaaatgtcttatataggatataggatagcatccattttagcctcaagcttattggccgcagaacgctcgctgagatctgacacgtgttgtaataccggaagagcacaaaccacattggatatctctgttaagatcgcacggcgagtctgtttaaagcacatactttattgtagaatgcgttggtagcaagcttctcgagagtgcttcggtgtaggtatagatagtgttgagagggagtgatgccgacggcgctcagtcggatggaggaataagccttgggcgacctgctgtcttggaggaagagaatagtcgattgaggagttagccgatgtttgagtttatggaacgcggaggttgtcttcgccttcatagccagtggaaccagcttccatcgcaaagcttaccgaattatatcctccatgaatgctcgattatctcacctgaccggttcaagtaaggtctcatctccaatatagcagtatgcatcgcgaagggaggctcggtgacaacggacggtgacggaaggaaatgaatgtgacttatgaggtgaactctgaacttttccgtgtcgctgccgcccagttgttagaattccggacgaagttagcatactcgacgttgtagaataacctgagggggtatcagggaagtcattaaaagaatttggaagtccggggtaaggtgtccaagctggtcatagttccacggtcagtaggggtacaatgtgtacatatagcaatacccacagtcaactccacggttctgcaacgcttttagattctttggggaaaatgtttataatttcgtacttttagccagattcaaaacattcaacacagttaaatcatttatccaatctaagataatgctatattagttgcccaagtcaagtatattccaccaatcagcatgttagctcaggggaagagcgccgggctcataacccggaggtacgtttcaccgaacccaatttgactcacgaacgtcannnnnnnnnnnnnnnnnnnnnnnnnnnnnnnnnnnnnnnnnnnnnnnnnnnnnnnnnnnnnnnnnnnnnnnnnnnnnnnnnnnnnnnnnnnnnnnnnnnnnnnnnnnnnnnnnnnnnnnnnnnnnnnnnnnnnnnnnnnnnnnnnnnnnnnnnnnnnnnnnnnnnnnnnnnnnnnnnnnnnnnnnnnnnnnnnnnnnnnnnnnnnnnnnatgctatgtctatttttttttttttttgccctctcttattgtcctcattcctttcttttaaaggtccttttttgctaatacatcaagcatgtcatatgtgggggaattatttgaaagtccaatcgtcgtgatcacccatgcagcattccaagttaagaagtcttcatgacatcagtaaccccaactaggtatcattttgatcaccacgcaatagccctggggctacgattccctaggtctgtatgagatcgttaagaatatcatgacatacttgactccccgatatagcctcacatgcaaggctctttcattcatctaaaagatgcctggactttgtcctgcctgagagcatcatactgatgtaatctatgggttcaatttacactagtataaatatctgattgaccatgacccagacggaagtcaatgtaaggcttttcagttctctactattttggaaaagatgacggaccctaattcagaacaccaccttcacaggtaaggcatcaatcccatcccaaccggtatcatgatgctcacattcacaaggtacggcaactggatgccagcagactacaaagctcaccaagaatggctggggggaataatcaagaaagtcgacgacgagtctcagaaacccctccacccggtcctggaggaattcagacaactcatcgaatcgaacactcgcatatacatgctcttgacttcaatgttcaaggaagtcccacggaagaagcgatacggccacgacgtaacgggaaaccctgaaatccgcgactataaccatttcctgcgtgttctcaaccatctcctcaccactgcgccttcctggaccgacaaggcaaaccgcgtcgggctagtcggtttgcctattaatgccgtcctcgactggccgatgggtacacctagtggatatgcggccttcctagatcccgagatcaacgcgatgatcaagaagatcttgaatgtgtggggcgaattcctgcgctctcccgcttccgccgatgtgctgaataacacctctcacggatggttcggtaagactggccgtcgggatcttacagctgttgcaaagatcggtccgctagcgcagacggaactggaattccatgacatgtttgaatgtgacccatatgctccaaatcacggcttcaagtcatgggatgacttcttcacccgcaccctcagggagggaatacgccccgtcgcagatccggaggacggaaaggttatcgctaacgcgtgcgagtcgaggccgtataggattgcgcaccatgttaaagtgcgtgaccacttctggatcaagagccagccctactctgtgctcgatatgctgggccatgatgaacttgcgtcgcagtttgttggcggcactatttatcaggcattccttagtgcgttaagttatcaccgttggcacgcgcctgttagtgggaaggttgtcaaggcctatgttgttaacggcacttactattccgaaccgttgttcgaaggtgttgggaacccagatgttgagcagaaggatattgacatggcaggtcaggtcacttcgcagggatacatcacttcaaccgccacgcgagcactcattttcatcgaagcggatgagccagccattgggttggtggcattcattggagttggaatggcagaggtctccacctgtgatatcaccgtcaaggagggcgataaattgaagaagggagatgaaattggcatgttccattttggtggttcgacacattgtcttcttttccgaaagggtgtccatgtctctggcttcccagagcccggactggcagagaacaagcctgttcgaagcaaactagcagtcgtctcgtgaggaacagaatttaatgctcgaattgcccatatttcgggtagaaaagttggacttcaataaagatcagtatattttcctgcatttatggtaaatatatctccagtatttaaaaccatcggcagcctcataaagaacgagccaacgagttttctgcacaatagactgcgtaattcatcgtttactgaatataacatcaagtaaagctgcttcacttccagattttcgattcgatttactacaagcgttttggctctgggagcagtggaaacaggaaaagcacgtgatctatcatattgtcagcggttgctccagcgacaatctcggggatactattcccaacaacattagctacttatcgcgagtctttcagggaaaaatagggtcaactttgcagcagacaatgttgcgtttaactcgccccgatgtctgccgggaaaacccccgcgatcttgtcttgggtcgaagaagttgcgaggagcgtgcccgaaaccccgcctaataccgaaagactggtggaaaacgcttcaactccagcatctcagcacaaacgcaagaggtcggtgttcgaagccgagaatccgatgtcgcagtcagaccctcataagagatcctaccgaactacctctgaaacagcatccaccgtttccgtccgcttagctgacgagataatctctctggccccatcaagttccgcagccagtcggggtggtgggcgatcacgctcatcgagtccatcacgcgtgaaggctgaactagccacagccatccctcgggtggtctatatacatgaatccgccgaccctaaaagccgtgctgcgagtcagctactagcagatttaacacaagattctgagttcagtggaaatgaagatgttgctcagaaaatctcgagtgcttcgtgtcaatgtgccacagaattgcgtagcgaaggctcttgggtgcataaggtagcactgccactattggagagcgctattgcagaactaccgctggagtgttggagcatgtatgtcccacgaagaccccgtatccccctggttcttgctaatttctggcagtcaaacagagtccgttgacccccagtatcaacctcgttatacagcccgcgatacatataaccgaaaaattgatctggttgtcggtcttcccgtgaatgcttacgaagttcaatatgaaaaggccgggttgcatacgacagggaaatacttcagccatatgacccatccgcatactggaaaacgtgttctgggtcctggtgttgaaattaaagccgcggatggaaatttggtggaagcgcaagtccagattggggtatggatgacaggacttctaatgtgggcattcgcacagcgtaagagtgtcaaagatttgcctccccttgttgggtgcactgctgttggagaagactggaaattttatattgcaaccggagtcgaagagtcgggtgtcttgaaagaagtagtaggtaatatgcttcagtgacttgggtacaatggctaatttcttctcctacagcgcatctggggccctttatctgacttagacggccgtaccacaagtgtgaaacataccacgtctcttttaggaactcttcgtcgagtcatggagtacacaatcgggcagtacaaggaagggattttccgagcaatcccttccgtggtttaaaagctacatggccattgcaaaaattcgtcaaataacgaatttcacgaatttttttatccccacgcctcgaatttgcttgatatctggaagatctgcaaagtataacgcatgcagcctgtgatgtcatactaaacgaacggggttctacgccattttgaagcatccgtcggcttcactcgttggaatttaatttcgggatggagtccaagtttgcgatactcgcgttttgtttgcttttgagccatggcttggctgaacaacgccatccccatgttggatctcttggcgatcttcgcgtattgcactacaacaacctcggtccccagaacaatggcacttcagctattttagcacacgatcgctcgagctatttcgatgctgttgcaaagtgcattgccataggggagaagctcttcccgtggtcttcgagtgaaagcaatagtcaagttcactccgaactcggttatgaactagactatctcatctttgcgaaagaaatacgagatgatgactacttttggctgtcggaggaagaaaatcgcaaaatatgttctgctttctcgatcgcccatcgcaagatcatacagaaaccatgcaatgtgaagctaccagccctctgtacctcaagtccgcccggaacaaccgatcgcgaccgagccgtaagggaaaccacgaaactgaccgtcacatcccacgattataccctaaccggatatcgagatgcgcgttccttccgcttcctcggggtgcccttcgcgagtcccccaattaatgacttgcgctttgccccaccgcaagcctacaccggatcgaacaacatcgatgcgactagcatggggaattcatgcatccaatctgcttcagcccttagcactgtgtctattggtggaatgtctgaggactgcctttacttgaatgtcttcaccccattcctgcctcacaatatcaccaagaacaccgcccttcgccccgtggctgtttatctgtatgggggtgcattcacgaaaggtaccgcagctatgattgactatgacggaggaaacttcgccagccgcagcgatgtggtcgtcgtcacagttaactatcggcttggagcattggggtttttgtctacagggaagctgacaactgggagctacggtattcaagaccaaatcatggctttgcaatgggtacaaaagcacatttctgccttgggaggtgatccatcgcatgttactgtcttcgggcagtcatctggtggtcaaagcgtggtagctctgctctcttccagcgcagcgaaaggtctcttctccggcgcgctggtgcaatcagcaaacttcgacctgccatggtttcctcgcgctctttattctaaatacatcgctccagaagtcggaaacgcagttggatgtgacggaaacgccccagaagcaaccctcctcaactgccttcgttccgtcccggcttcaatgtatcttgataactcaactgatttccagactgctacaaagtccttctcatccaacaaggcaaatcacttctaccataatacagaactgctatccgcaagtgaaccgttcatgccgatggtagatgacaccggatcaggcgttatcgacgaccaatttaacatcctcctctccaagaacaagctcccaatcaacgtcccgaccatgttcaccaatgtccgcgacgaagcaagcctctacatggccattttcggctcgacccagagcccactcgctacattgcttagcgttatattcggcgataccctcgctcggaaaataatatcctctggggcatacaaggttaatgattccgatcacgatgccgtcttaaacgctgcttccgatgcagtatcgcacagtcagtggacttgcccacagggctatcttctcgagaattccatttccatctttcctgtcctataccaagtccaaatagcagatggtcatgcagagacatcaaatatgccgggcatctgttacccgaatactgcgtacaatgcttcctgccatacctcagatgtcttgctcgcgtggggtaccctgaacaccaagacgcaagatgtgtatccgtactacgatgatttggatattcttcactcacagcttgttcatgatgtattcggtgcgtttttccgcgaaagaaacccaaatccggatctggagttcttgaagatccgtggtcctgcgtatgcaagtactctctctatatttggtggagagtcggttggttcgaactcttcgtttgggcgttctgagaagcggtttcttattgaggagtatacggcttcgacacgaaatatgacgcttttgggaatgccgccgtctactacggccaattttgaggacgaggagatttgtgctgtgctgcgcgattatggttttactttccagagggcgcggctgtcggattagattcacgttgaattcggtttgggttattaactaaatcgctacaatgaacgattcttgaacatttagtttcagatatatatgatgcacattcaagttcaagttcatattcgtgtgcgttgatctacttgagcttgtcattccatactcattcaaatggggagtatcataggtgcaattaagcgagaaaaaccacaagaaacaaaacgccaattaaagaagtccgccagacataagaatggaatgctaggttcgtcgtgaaaaagatgagtcgccaaaggcaaaatgttgtgatagagccgatgaaaaccaaatatccatatgcccgaaaatgaagaaaaaatgaaagagattcgttaaacatcaacgtgcagcaagtcgtgagaattattcgtaaatcggaaccctccgtgaggggatgtatccgtcatcttcaggaacagtggcaggaggatatcgctttgaaggggagctgcgagggctcgcccatccagttgtacgggggtggaatccagcactgctgtatgatcgcggccgctcagatccgcttcctccgctactgggtcgactattacctgtacttccgccactataacttcctcttctcatatcatctgcggcgtgagtccctcgatgtctcggtactgctcttggcggaggagttggtggcctgtagaaaggtgggtctggagcagctggagcaggagttgagtcaccgaatatgaattcgcggaatttgacacccgctgtgcgcgatcgagaacggtcctttgaatgttcctttcggaaatctctcggatccctatcccgatgatctctcgggtgaaacttcgatgaaggctcagagtgggatttactagatcgtgaagggtaagtctcatacccgcggcgatttcgggtagggcttatcggtgacagatctcggaatggcctgcgagtgtaggcttcgtgggagtgacgtctggcattactgctagaaggtggtgagagatgccgtcgggtttggtgcttattcggttccgcacggtccttgcggcggcgtgcagactcatctgaagacacatcagagacatttggaatatcacctgttcctgggcttagtggatggccgtgccgagcaccttggtctcgtccgcttgaatagggcggacgctccccccatgggggaggggatgaaactctcggggtcgaaaagcccggtcgactcgctctaggcctgcgtgtagagaatgcgggatattctccactatatcgtcggcggtgattgcgatgatcggtgggccgatcgggctccgcatgactgtggcgctttgacgccgcccggcctgaacgcgagaaatagtcgtcttcgtcgggcagaggatccttgccactaaaatggtaatgatatgtcccaaagtctggcggcgaagcacgcttcgtgtgtcttttcagatagtcacgctccaatcgccgactcacgccttcatgccattcaagcatctccgggtcaggctcagaaggaaacgcgtctcgagggatcgtcttgggaaagatctcgccatttgcatctacaatatcccaaaggctgactgcattctgcaaatacactgagtgttcatctgggtccatcaacagttgtattgtctgccaccgcacgaagccagtcggaagtagcgagggaattgatgggggttcgtaagggttggctgagggttggagactgtggaaacatcctagtgactggtagatgaatgacagggcttgtgccttggtctcaaggaataaagggtcgtagttgccgccgaccttgcggtaaaaagtagcaagtcgatccggggtgatatcagtggtggcgttggtatcgaaggagcactttgggtgtgttattttggtatccaatccacttcagatgggtctagaacttaccatcaactgcgctatccctagacatagctgttctagcagcggggctgggcttttgtctgaattgatcagcgttccccagttaatatctgcaaaagccatgaatgtggggtatgagatattgagaagtgcatgcaagccgactcattaaagcatttcatctcacaggcttcgaggttgggcgcatgtcaagagagaggtgacagcgaagaggaagagagcggtcaggcacacacgggacccactgcggggaaccaaaggaatgcgaagtatggaagggatatgagtgaagtatatagaatacaaagaacaatgaagatacttaactattagaagatgtctgatatctccatgagttgcacggctgagaatacatgtgacttgatgtcacgatatccgtgactcatatacatacgctgcatgactgtgaagcctgatgtggcgctgtagatctgacccaatcaccaaaagatctcaattaagggacaataataccctacgctaaactactttaggtaaggtgtatctagatccattggattagacgaaattggttttgagctgagattttgagctgggattttgtgctatggacttgcggctaattatctgttgtaatccttcctggtaccctcgctaaacagtacttgactatcatgacatgaaaggctttaatgaccacgatgtaggccttcccaaggagcccatgacaatgaaccaccgttgttgcgaccatctccttgccttctctattattgtccttatagcccgttggaaaatgctaatctcgtgtcagaattgaaatctgaaagttgagatgactgtcagcctcccccaagacaatctcgttctccgcgcgcgagatgacaggaaatactgtaatagtatcgatgccttttttctcggccgctgcctgtatctccgtggagcgcttcacgccaaagattgacataactccatctctaatccgcatcaggactgaaaaccagacaggttgtctcgcaaagaaaagcccgcgcaagggcatctgggctgtattctccagacttgggtactggaagggacacagcaaatgcgtcaacaaaataagctgatttatatgacgatggcaacctgctttcacttggaaaggagacggcacgaacgggtgctggtagcatttttccttgcgctgagctagtgtgtaaagaagacgagattgggatataaagaagcgagtgagagcgcggtcgagtttgtgctatggcgacgcgaagctttgtttgaccaacaagccgtggaaatgaaagcattaagttatgtggcttatgtatcaacatggctatgaagacgatcgaagggatgacaaccgttttatcgagggtatgatccgtctagtagtctccgagggtacccgaatagttgcccgtaaacatccgtattgaagaggggaccctgccacggggacaggggcaccgacagccctgcctgcaaaacaggtgtgagagcagagtattcactgggagtattaggttgctagagaggagaacaccatggggtgactaccgagaagagaggtggaaaggtgtctgcgttgctatctatgcctcgggagtgcttttatatcacatagccgcttagtcatcctgctctgggaacccccactgcaatataaagtgcaggtacctgattggcccaaggggccatatgaaaaaatcaatagacattgggacgaggtgtcaaggcctaagcgggacgaaaaggcatacacacgagtaactagtcaggggcagacatcttagtatcttcaaaactgcagtgggggtttccagagtaggatgactaatcggccatgtgatatgaaagcacctccgaggcatagatagcaatgcagacactagacaccagacaccagacaccttcacttcccagtagtcaccccatgatgttctcctctctagcaccctactactcccagtgaatactctgctctcacacctgttttgcaggcagggctgtcggtgcctctcaggggtcccctcttcaatatgtaaattaataaaaagtatgctaagtcctctttctgtagaacttgctgaaaataattgatatctcagaccccgtttctgtaactttcattgcaatttcagacaaatatagtaaactaaggagaggtcattcagtctaaactcccgaactgatgcccaaatctctataaaatgccctcaaatcgggttgtcgaccaaggaattctgccattgtcgtgttctcattttgactgcctcctttttctagagccaagtgcctgaatcgtctcattggggtgtgattcaatggatttgtttggaaataggattgaaatatatcgaccgaataaattcgcgagctggaaagtgttaatatgagcaaaatcatagacttgaaagccagcgagaccaaatatcttactatatgtatccgtaatacctagcatcatagcctgagacaagatgaccgaagtttgcgtatccatgcccccagtcatccttttcatcgcgcacacaggagctattcaaaccaacgacttggcgctggaggcgattgtacagctttgagatggaggtggtgttaagggcttctgaatcgccgatttgatgcactgccatgtcaaaggttgcgaaatggatttgttgcaaggttgagaggacgcgatgtgatctttttgcgttaatgaaattttggagcaatgagaatggagatatcgatgatgtagaggtattgacattgttattatgcgtaggtcgggtggtggaaggagacaaaagagaaggcgagctgatagaatgcagtatggactcttcccaacaccagctttcgagtaataggctagggatctcgacaaagtccctcgccaccctagtgccatggaaacgagagaacgtggtttttgacaccaagttgtgaacagcatgtccaaattcatggaatagagcaatcagatcatcgaattgtagattggcttggttgctgatggtaggtcttgcaaaattactgaggattgcagtaacaggataccacctggttccgtttgcgaaagtgaagccaggctggaggagaaagttggcgacacgaccaccgaactttcctgccctcgaaaagagatctagatagagataacccagaaagggctctgtacagttgactgcgtcactgtcatcccaaactgcgaataatcggacgtcctcatgccagacaatcccattccgatctttcgactcggttatcccttcaaatctgattccgaatagccttgctaccatctgcataacacgccgtagaacatgttctaaagggaagtacgccgataccagtgcgtcaatattggtgtgagcatctttgttcgcttgcaagcggctgtagaagtggtggtcccataactgataagagtcactaaaggtctctgacatttcctccagatgaatccgtttgacctccttcaaaaaggcaatctcttcctgtccggcagcattgagatcttgcttcagggcccagagcaatttatccacatcgcggaacgatctcaccatattgcctaccaaggcaccgtctgcatgattctgaaatcctgctatcctggccgcatcattgcgtaaattgacaatttctgcaaatattgccgcattctcgtgattcttgttctcatttgccacgtacaccctctcccgtgtgtgtgatcccgtcgcagatcgcagcacaagcgagacctccgctcgtcccaagggtatcttgaacaaattatcacctttagaatccgattccaacttccagatggaaagccactcatccgatacaccttccagctctgctctgctaaattccagcgtcggtggtggatgcttcagattctcctcatacgcatattggagttcgctgagccgtgtctgaatttggttatattttgtctgttctgatgggttcagatgaagaccatgttgtcgaaaacatctcaaccgatcatcaagaaaatgctgctgctctgggaggagggtctgtcccctttgcgctacagcggagacgagtctgaagatgccgctatgttggcaagattgcctttcgaagctctctatcatcttcatggactcaatagaagcgttgtgcacatatgtgttgctcgtcacggacttatagaatccaacaatatggtatctgagtccgcacagattttcaaggtttgctatgggcagcaagacgttctcgaacgtggctttcgtttcattgacatcttgttcaagggaattatataattctctgctcgtctcaatacaatattgaatgtcttccatgatggatgatggggttcctagaaaggaaggtggcgcctgtggcggcctgcattgcacatttgctgacggctcatggaatggagtggaattcttggaatcggatattgcttcacctgcagacgctttggcaagttcggatgatagggttgaaaattcttcggcccaaatatagaatagagcggtggttagaaatattatgccgccgaagaagatgaacgagacgcgaagcggcggagccattagactgagttgtgaacgacaagaagatatggttcatggcaaataggaatgaatataggggtcttcatttgattgtgagcatctgtgttcaaatgttttgcttagactgtcacatcataggctcccgaggtcgggccagactaatgcatgattacatccttagtgccccatagggtaatcaaccttggaagttgcatgaatgattacccgtaatcaagtaacaccagttgacggaaatatatagtacgacaaatgtaaggctaccttcggtggtgactaagtaaaactaacgggttgacgaattgtagcgcgtagggtcgttttggcctaattgaggctcgaagaaaagtaaggatttctgaattaccattgcagagagcttaataatccgccagccttaactaactagattggcaaaatggagcttttggcgccatagaagttcacacatcactactttttggggtggtaatatatgaatctttcatgttcatggggtcatcgggcctggtattgttacgagccaattcgattcagaagaaaaaagtgcaattcaaaccaaattctaagtacgaagaagaaaggaaaaagagaaactatctgagtgcgcgttctccccttcttatactcttgcgtttgtctcgtttaattcctgtttgtcagtttgggaaggtacgagggcgtggtcgttccttcctcgtttggcaagtacgatccttcccagatcgtcacagttattccgtcccggcaagggtgtaaaccgatgcccaaaagcggtctaaattgaggccaaaaatcaggcattaaggcctcatttaggccaaaacgaccctatgggatagttgactaactaactagttaactagttacccgccatcctatctactagtttgtcatccaaggactagtttcaagttagtcaagtctacatcgtaactagttgactttaaaaaaaggaataattttcgcataaggcaaagcacgaagagactgaaagcaaccagattgaaatttcaagaaagtagaaaaaagtaaaaggtactggggtaaccaaatttaccctacgcttgctccacaagaagggttgtagagatgtaagatctcaaggaaagaacgcctgcagtccgagcatccaagtatatcttccggtccaagtatgccagagtctggtcaatcgcccaaaaaatgaacaagctagtcgatatgtaggtctcaacagcatcacatcgggtgatcgattcaccaagatccgtaagcaactgagaaaatgaccgaagctcgtccctcggttcagaaatttggtagggatactgttcagctgcttcttgtagatgccccgcaactagaaccgcacagtttttcaagacggatggcctcatgatgtccaatggcgtaaattcatagcctacaacatcaagaaaccatttctcaaggcgattatatatggtatcccgcgtgagacaaaatatgtgcttgcgagcaggcttccggatttcttcccggccgtcttgatagagcttcaggtctaaaagcccatgtttatcgtatgacatgacgttcgtcagtcgattcagcaggcatgatttttccatccgattttgatcagaagtcaagaaacaaccccgatcaaacttgacggaggtggttgagggcgcgctgataacagcctgtttccatcggccaaatgcttcgccgctgagagtgagcctcgatgcatccagcaatttggacatgtgaccatgactagaaatctctaggatttttttctgaatcacggaggcctctctcgcgagtactgccacaaattcggaattggaattattctcccaacgacctaagatcatatcgaatatagaactttgccgacctgcgtctccttcttggacggggagcaaggaaccgggactgtcggatatgagatgaaacgccgcaataatgcaactgcgagcgctcccatacttagtccgatagcgatggtgaaccaaagaaccagcactgaatgcaaccgttatcggctggtctgggtattgtacttcaacaacacatgggctttgattgtatacgcgcttctgaaacccaaagacgttttccaaggaagtttctgtcaagaatacactgtcgttttctgtcgaccaaggtctaccgacttcatctaggcggatgcggcgattgccgagatgtgtcccgggaatataagtgaagttctggcccgtcgggcctctgggaactccctttttccacccgacaagaaccttgaactcatgtcggaatggagtgttgtcaatgtgaagcatgttgtcttgggcattgactgagattggttgggtgtcttttcctcgcacatcagtcattctgatcgcaccgcccatcgtatatgcaatcagagcaaccaaaagtgggtgaatgaacgcgtcattatagatcttgttcttcaaaaagcttggatgttgggagagattgaggaacgaatgtaagaacgcctcactgccggatgtcgccatcgcttgcgtgtagtccccaatcaaggtagtgaatcgtgctttgtcaatgagaccagcaaatacagcacatccctcggttttcagaacctcaactagctttagaaaggcactggtagtgcgggggtcgtcccaggcaccagacaactcgtggatgagtttctgtcggaaagcttcattttcttcctcgttgtggtgctttctgtacttgtttgtttcgaggctcacagcaggactaggtggcgcctgggcaagatgctgagcaactagattttgagggtcgatactaggtttgatttgaaaatgcagaggaaaggtgttgtcgtgtgtggtaccgtttgtagtctcatcaaacactccagttgtcgattggtgataaccatatgggtgttggtgcttccaagttgcctccatgatgaaaacgaatgagatagtgtttgtttgtgaactttggctagttggagattccgcctcttctgtccgtatatgtaagtgcttctcgtcatgtaaaaccgtaataaacacgtgggtgtaagctgattactcggtggagagacagtcagctcccgagattgttacctgcatagatgattatcaggtaatcaaagtaagcagaaaaaaaagtgctgccatgacgatatgatcgcataacgtgatttgagtctgacaatgcatctttttatatcattaagttttctataggaacttgaacccgcttaggagaattctacgccctgacataatcggtttttccacctgttcctttacaatatgttctcgaatcaagaatatgttcagttgagaatggagataccagcagaagactgtgatcaagacgacaaatgttcggtcacccggcacagaatactcagggactggtggaagattctcattctggtcacagcaacttctagcctgatttcatttggttctttctctctcctcggataccatatgggaaaagcctccaggtccaatgattggcaacatctctccaacattcaatgtggcaccacgttatctgaagctcaagagctaggatgcgagtttgacctcgtcaccaacaactggatgccaaagcaatgcgcggatcccgatacaaccagagagtttcgcgagtgggtggctaacaatgcacgccttcaccagtcgtggccttactaccttgatggcaaaggagaaaggcaaatcgcctcagaagaagatatgtccaaaatgatcggccagcgactatacacaaccacggagaaccacttgggacattgcacttttctcatgcgccgattgcaccgcttcataaacaacggtgccagtattatatcgcaaatcaacctaaatcatacgattcactgttcctctgcaattttgcaggcgattggtagtcctgattgtgatgatcgtggcaagattacatcgggattcgatgtgggcattggtggatgttagagtgtgcagcatatgggatccacattgcgaatgtattctgtgaaggatgctatccttctatcacaggaatccgtagctgagctggtaatggtacgcaagcttatcatgcatagttattattattctctttttcggggccaaggctgaaacaatgatctccatgtatgtaattcaaagacataaatatttaatccgagtgattaccaccgaggtcaggatccagaattccctcactaaatccatggagttcctcgggcctcccgtctgccatccacactgtagtgtctactcccggtctcaattctttccgcagggtgttgagtctgtgagaaatagcgatggtggtgtgcccttgattcgtaaaataatctctcaacatttcctgcatcttgatatccgtttcgaggtccaaagatgagctggcttcatccaggaggacgattggctttcgttggctaatcacggggtcaggattctgagttgatgactggacccttagtaacgcctgtgtgaaggcgagcatctgcatttggcccgtagaaacgggcgcaaaactagccagcggttggtcgaggaaccctgggtttgtggtatccagaacaatcccgttcgttgtccttcccaggaaggtgtctcggagctctgaacgagatgcctttgaccaaagtccagtctttgaaagcatctcgagaatggtatcatcttgatgttgattgtagggatcgagattgaatcgaaggcttgcgtcgggaagtatgaaagggtcctgaggtaaagcaacaaagcagcgtcgccgtacaacatgtactggcaagcgagtgatatccacgccatcaacctcaattgttccagtctggggccttaataactgcagcagcgtaagaaggagactgcttttcccactgcgaccagtgattaaaaatttccagtcagcttcgaaaaaggagagtgatcaagagcttatcgcgacaactttaaagtaccttccagttcgaccacacagaatgacacctgacccaccccgaatgtccatattcacctcacgaaggacgggcacatgggaactgcaaagaatcttgtcagtcttcggtctgctatgtccttgtaagtgagactaacttatagcctgctgatacgtgttttattttcacggaacccatatttggccactcgggagagggctctaagcagtcccaggatttatcttccgagggggtgtcttcatcaacagatcgcagccgtgaaactgcgccaagggaggtctcgagggttgtccaattctcaaccaggcgaagcaatgttgtgtttgcagcaataaccatgttcagcgcaatgcccatgtcagcacctgtggctgtgcttcgaaatatcactgccgaggcaattaaaatcacagcaatccctgcaattaacaaatctagaactacattgagccacctctgcaaacaaagcagaagatacaatggcctctgtgagatatcgagtttctcgacgttattgatcgcaaatctttcttcccatccaaagccacgaattgtagcaattccttcaacctggtcaggaattagcactagtcagagtagggcccggtatcttctgcgtactgtctctaggaaacttgtataaagtttttcctttgactctaggtcaatgaaacgcaattgccgagaggttctgagatatgtttgttgaatgaagtatacacaaatagtgcagagcggtaaagtcattgctatggtgggctgagccacaaataggacgatagactgcatgataagcttgaagatctctggcacctcatgtttagcatgagaaagtggctggcacatgtggtactggacatacggttgctgagatttgcgaaggctgaaggcatttccttgtcgaccaattgaatatcttgaccgaatctggagtatttgcaatttagtaaatctgccatcgtatgaaattaatttgccagacctattcaatatggtaccaatatcaaaggtcgaaaagtatgaaagcggtgcactattccaatatcagtgaattgctgaggaggctatttttgaaacatacttcattattttgccgagaagtcgagaatgcagagtagaaccggatcgtggagcgatgactatatgtgttgacctttaaatccggttcagtcagacagctggattgacagaagagaggtagacaaaccacatggtcccgttggtcgctatccaagccattagggatagtaagaaataaatcagaatatacaacgttgagtttgcattgtcggattcagtccaccacttgagaatgtactgtgcgaaagtaagacagaatgcatatatcgcagtgcaggttgccatgagcaacatatttgagatgccggccgaaccaaaataatagccttaattttgcgtcagatattttcagcgtaggactagaggtagaacttaccgtagactgccaaatccccggttctccttaatttatcggcagcggcatcatctatctgtgttccgtctctctgtgattttaccgcaatttctgatttatcagcctctgatgtacgttgtagaacatggctcgtcctcatctctggctttgtctgaagggtaaaatcagaggagctctggacttgtactttcccttcattgagcaaaattatcgtatcggccaggtggtagtactgagctaagccatgtcagaaggataagtcacggacaatgaaaggggccgaacgcactgccacgagtgatgagaaagacggtgcttttcattttgcgcaaaatcccttcaggaccaagcaaagcatgaaaaatttgactctcgactgctgcatcaatgggactaaacggatcatccaataccatagtacggcagcgagagtaaactgcacgggcaagagcctccaataaccttcttagtggtttgatcactggatggtctgaagaagccagaacttacaatgcgagatttttgccccccagaaacattaataccaccacttccgacccacgtcatatctccgtcgaccagcgattctaaatcggcaacgagacggcaggcttggatgacagtctggtaccagtccgcatcaaatttgcttgattgtccgcaaatgacatcccggatggaggcattaggaagccagacagaagagctgcaatatgctattctatcatgcgaaatagtaatcctgccctcagtgggatttatttccccgagaattgtcaatgccagggctgatttcccactaccaatgggccctgagcatatgccaatcgaaccttcggtcatctgaaggtgaacatgctggaggacttgatgtgagctagagagctgtatgctgacattttccaatgtaaatgccagttgaggaccaggttgtggtttgtcttttggcctggaggtgaacacacgctcatcttttaatgatccctgggtcaagtagctttgtattctttcgaagtttgccaaagatgcaatcacacgaggtactatcgtcatgaccatattggctgggtgagtgactagacctaggagagcgatcgaggtgaagacaatatccgcatttggggcatcattttcactgcgagaaactgcaaacagcaccaaagtcagaaccggggagaatattcctagcgcattagctaaagagatggacgaatagtcagcttcaatatattggctagagatttcgtggccatgaacacctaggaataacagagtcgaaaagaattgttggtcttaccgctggcgttgtatgctaccataatccatcgcaatcttatcgacttcgcaatctctcgagctcttaaattggagacaaggaagctagtggcctgatcgagacctagaatcttcatacttttgataccccggaggaccgaggcaagcattgaaaggcgatcctgagttgcaacactccaatccttttgttttgcctgaagatgttttgcgacatatgcgctcatttgtgaacaccctagagttagttagcgtttgtctggatcactggtgtctggtgtgtgactatatcataccaaatataatcagcaggggtagtagtgcaaaccatccaagttgtcttccaaggagcgcggttccgaccaatacttccacgacttgcgcccaagtctcatggagcatttctgcagaagtgtcaaggctgtcaacatctgcactcataagtgttaaggcatttccgtcatgtataggagagcttgcggccctaagtgacctagcatgaagaaggctaataagagccccacgcgccataatctgcagtcggttgagcttgtgtcgatataccgatgtggaaatctatataatctcgttagatatcatgattcgaagtggctccttagaagacctactgctagaccgcaatatatgatagtggttagcacgataagccaatatcccgaatcagtgctctcgtgttgaggaccgtcaatccgcacaaaagtcatagcaatcttaatcagagtcggctgtgagtaccgaaaaactatcaagaataaacgcggtatgataggtgatagacactctacccgaaaacaatcaaagagaacacaaggcaaggtgaatttggtctctggctttgctggacaaagcgttaatgacctcattattccaacattgtggtaggcgatacttacatctctgtgtccaagcccgtacgagccgtttccgtaagatcctcgaggatagagctcggtcgacttttggtaggtcatcttgtgtcaaaagctcatggtaaccctccttgagaatagggttgatccaccaaaacagcgcacggccaacaattcctgtaagttcctcgggcgcaagatgtttatagcgaggctttagtattgcgagcttgtttcgaagctccactactagtaggctgaactccagcaccaatcttatgctcaggagcattaggcctgcagttctgagatcgcccgatggtatggtcagggcaatgagatccttgacagaacacagggccacgtatagagtgaccggactagatggccgcacagtcctgcggtgctcaaagaatgacaatataaaaagctcgaaagtagcgaaggttgatgcgaataatggagcctgggaattgaaatcatctgagaggtttgttatttcgatgagggaaatgatttgggtaatggtaagccccaggactaggatctattgactccaggcagatgcattagcaaatccgaagaaatttttgtagaaagaagaagtgatatctgactgttttgatatggccttgaagattaggaaccaccttggtagctgaaccgcgtagatcccacaactgcaaagacgcgtagagcacgaaggtcactgataccaacaatgagtacagattgagccagacagacatggtttcgaggaactatgttgcgtgtaagatcgatttcagtggattgcagagttgtgagtttatgtttcttcgacacataattagagcttctcttgtcaccgccatttttttgtcttacagaggattgtaatcgtggcttctgagctaggccgcatgattacgcgctagataaattactcggtcccacaaagtacaaagagacccctgctaagatgacgcaatatcgggcgttaatttgtagttggagccttggaatgtgcattttccaggtacatagatgtttcccaccattgcgaagggtatagcggccaggggtcggatgcaatgttttattatgcgttgatgcctgaagtaggccttatttttaactccctttacaccgctctatacagtactgtaaatgaagctattcatactatacaaattcctgtcttcaccgaatttcaggcagtgagagcaacgcagacaccttccacttctcttcttggtagtcaccctatggtgttctcctctctagcaccctactactcccagtgacgactctgatttcacacctgtttcggaggcagggctatcggtgcccttgttgtcctcgttgcagggtcccctcttcactatgtagatttgctcagttgaggggggtctatagcatgttcaaaaagtttttgacatctcataatgattctgaaatgaagtgttagaataaaagcacgacgctctataattagcgcctcaatgtgacaattcattcatgtgtatcccgtacacttgaattcattcctcggctattctacattatggaacaaatattacttgtggccaagatcatttcttacaacgtctgctttgtattatttatcaaataccccagcgaagttctcgctaatgtatcgcaaggcgtccgcacgataagtatcctgaatagtcaacccaacgtttacttcgtcgaataccaatgtgtccctgttcactgactcatacttaggccaattataaacaccttgctttaatcccgcatttggatctaaagtcgtgataaagccagcccacatcgtacccatcaagctcgacatttcgtagtaaccaggcccctttccatggaatgaattcccgtcaaaccccagtccatcaagattctgaaaaataggggcaatctcagcaccatgaggaacgcctacccgagagtcacgctgccaggctggtgtcgcattgaagataaagttaaaacaagtggcagaagttgagaaactctcgcaaaccagccgttgcgctgcgttcatttcgatgtctccaataactgttttcactctttcaaaagtatccttgtcggaaatagagcctatgggaggttctagagtctctgcgacgccactttccgggtaatagcttaaaagtctttcgctgactgagctggggtagccgctatcttctgccagtggccgttggattagagttgaattcaaactgggatataagaattcaagaaactggtcgaaatattgatcgaaaaaaagaaagagacttctgtgatacataccagttaaaaagatggccaagtctttccatgtggatatttgaggcgggatccatgttgcggcttcactggagacaattccactgaggatgggaactggtacatatcgtctctctgttattgctaagctcccatatccttcaacaaagtttccatctagagttggaatggcaaaactggccatcatctggctgttagcctgtgcagagtcattgaaggctgcatctatatcattgagtggaatatgccttaagcattccaaagaattctccacgtctttgcaattggaggccactgagagcctctgatacatttcttccggggtgaacgatgaataagatgtcttcacaattggacctccactttgcataatggctgctcggaacaagccatcatcgcgtccaccgtatgcagtgagatggaggccaacagagtcagcaccggagctgcctccccagattgtcacccgacttttgtctcctccaaaagcttcgatattttcttgaacccagtgcagggctaatctttggtcgtgtaatcccagatttgtgttacgggtacctttgatttggtccccagagatgaacccccatatcgatgaccgatagttgaatgaaactccaataaacgaaagattctcctcggccgcatgtgatatcaagtatgacaaattatacctgccgtcgcctgatcctcccccatggcgccctcccccgtatataaatacaccaacaggcaaaagcccttgcttatagctcgaagggcggacaacgttcaatgtgagacaatcttccgatttcttgaattgttcttggtggtcctacgttgtgaataatgtcagatatgaagaacgcgtgtcggatgtgactcactccgtatccaatgcaatgaggcccatattcaagtgcaggttgaatatgattccacgagacgttgatagaacgaggataatggaatcgcaggtctccgataggtgcctgagcataaggcataccaagaaaaatatcttgatcaaaccgaaagttgtgggttcccgcaaaagtcccattccgggtttttgcaagaggctcatggtggggattttccctatgagtgtcgaagaattcggggacaaaccacaaagccgacgctaggactaccagaaaaagaagagatacagatattgaaatcctttgttgacaaatgtggttttttcgcctttcgggggcctgcatggcgctgcgttccgattctaatggcccgtattcaatcatttcgcatgggtttcgagggtaacagaggaaatatccagtctaccgttgtcaacgagcaagagccaaggatttccaagagtattctagcatgagatgggtgcttattttgtgtctcatgcttgtgacttaatcaagccaagggtaagcaaggcgagaagtggacgccaagcctggcgattacattcgaactgaccaggacccacagtaatcatctttcctatttgggggatatttgacattctttggtgtagtaaatcattcaaaagccacggcacggtcgttggtagctctcactaatgccaccatcgattaaaaatctcccctttttataaaaaatgatcaacatcagaataccaatgctcatgacatcatcgtgggagaggcaaggatcagtgattcgggtttcgtaggtaaccgaaatgtgtcattgaaaatatatctaatgtttgaatgaatagcatgtggctatttctgagtgtatccgttgtgctatcgaacaagtggctagtaaccgatatgaactttagtaaggcaaatccatctagtcccgacttttaatgacaaataattgaccagaatttccagcatatcgtaagattgctttatactatttcatgttttgtgtcaatactaagatcatgatacagcggcattcctagctacctcccatatgctatttggcaccatagcgataagtgtcttgaatggtttgaggccgacgtcttcgcttgttgtcactgatatgacattgcgcaaatacgcatcaatcatcatccccgtggcagtggcattgaacacgagcatcatctgtggcaatgaagccgttgcttatattagcattacaatgattcaaattctcaaggggctttcacctgtcacagtctatatgatgtctttgtttcttggtattacccaattcagcagaatgatcaccactacactgcttcttatctcgcttggaatttttcttgcatcttttcagtctgtccaaacagatctttacggcatctcagcgcaattaattggaattgtctctgactcatcccgacttgtactaatgcaaaaaatattcacctcgcacccattcacatttgacccaccaaccttattctatcacctcgcaccattttgtgcactcttaggggctatcatcacagcctttacctcatttccaactactttggagcttcagaatgtatgggcaatgctactcctaaattgcacccttacctcgatgctgaacctggctggactttttgttgtaagtaagatcatctttcggtacaggatgtggctgatgtttgctcagatacagaagacttcgtctctcaccctcagtctctgcggcatctcgaaagatatctttctcataacagcgaccacactgatttggaaaaccgaaatcaaaactttagagatcataggttacatgatggcaataataggcctggttttataccagaagtgcagtagctagccagcagtcgaagacagctcattacgataggaataaatttgttcatttttttcctgtattttagattattggttttcaacagagttgttccgaaggccctgtgcctaactaacgtaatcggtaaacgagtgggccatgtaaacgagtggcgtgacatgtgaaatgtaaatagacatcggcaaagcccagcatgggcccaagatttcagcnntnnag
